(19) United States
(12) Patent Application Publication
(10) Pub. No.: US 2002/0052308 A1
(43) Pub. Date: May 2, 2002

(54) Nucleic acids, proteins and antibodies

(76) Inventors: Craig A. Rosen, Laytonsville, MD (US); Steven M. Ruben, Olney, MD (US)

Correspondence Address: HUMAN GENOME SCIENCES INC, 9410 KEY WEST AVENUE, ROCKVILLE, MD, 20850

(21) Appl. No.: 09/925,301

(22) Filed: Aug. 10, 2001

Related U.S. Application Data
(63) Continuation of application No. PCT/US00/05882, filed on Mar. 8, 2000.
(60) Provisional application No. 60/124,270, filed on Mar. 12, 1999.

(51) Int. Cl. A61K 31/00; C12Q 1/68; G01N 33/53; C07H 21/04; C12N 9/00; C07K 14/435; C12N 5/06

(52) U.S. Cl. 514/1; 435/6; 435/7.1; 435/69.1; 435/183; 536/23.1; 530/350; 435/320.1; 435/325

(57) ABSTRACT

This invention relates to newly identified tissue specific cancer associated polynucleotides and the polypeptides encoded by these polynucleotides herein collectively known as “cancer antigens,” and to the complete gene sequences associated therewith and to the expression products thereof, as well as the use of such tissue specific cancer antigens for detection, prevention and treatment of tissue specific disorders, particularly the presense of cancer. This invention relates to the cancer antigens as well as vectors, host cells, antibodies directed to cancer antigens and recombinant and synthetic methods for producing the same. Also provided are diagnostic methods for diagnosing and treating, preventing and/or prognosing tissue specific disorders, including cancer, and therapeutic methods for treating such disorders. The invention further relates to screening methods for identifying agonists and antagonists of cancer antigens of the invention. The present invention further relates to methods and/or compositions for inhibiting the production and/or function of the polypeptides of the present invention.

[0001] This application is a claims benefit of priority under 35 U.S.C. § 365(c) and § 120 to International Application Number PCT/US00/05882, filed Mar. 8, 2000 which was published by the International Bureau in the English language as International Publication Number WO00/55350 on Sep. 21, 2000 and under 35 U.S.C. § 119(e) to U.S. Application No. 60/124,270 filed Mar. 12, 1999, both of which are hereby incorporated by reference herein.

[0002] Statement under 37 C.F.R. § 1.77(b)(4)

[0003] This application refers to a “Sequence Listing” listed below, which is provided as an electronic document on two identical compact discs (CD-R), labeled “Copy 1” and “Copy 2.” These compact discs each contain the following files, which are hereby incorporated in their entirety herein:

| Document | File Name | Size in bytes | Date of Creation |
|---|---|---|---|
| Sequence Listing | PA106SEQLIST.txt | 3,120,732 | 8/8/01 |

### FIELD OF THE INVENTION

[0004] This invention relates to newly identified tissue specific cancer associated polynucleotides and the polypeptides encoded by these polynucleotides herein collectively known as “cancer antigens,” and to the complete gene sequences associated therewith and to the expression products thereof, as well as the use of such cancer antigens for detection, prevention and treatment of tissue specific diseases, particularly cancers. This invention relates to the cancer antigens as well as vectors, host cells, antibodies directed to cancer antigens and recombinant and synthetic methods for producing the same. Also provided are diagnostic methods for diagnosing and treating, preventing and/or prognosing disorders related to tissue specific diseases, including cancer, and therapeutic methods for treating such disorders. The invention further relates to screening methods for identifying agonists and antagonists of cancer antigens of the invention. The present invention further relates to methods and/or compositions for inhibiting the production and/or function of the polypeptides of the present invention.

### BACKGROUND OF THE INVENTION

[0005] Cell growth is a carefully regulated process which responds to specific needs of the body. Occassionally, the intricate, and highly regulated controls dictating the rules for cellular division break down. When this occurs, the cell begins to grow and divide independently of its homeostatic regulation resulting in a condition commonly referred to as cancer. In fact, cancer is the second leading cause of death among Americans aged 25-44.

[0006] Cancers or malignant tumors are characterized by continuous cell proliferation and cell death. Cancer cells have been shown to exhibit unique gene expression, and dozens of cancer-specific genetic markers, tumor antigens, have been identified. P35B, a tumor rejection antigen, was first identified in mouse. A point mutation in the P35B gene elicits a cytolytic T lymphocyte response but no detectable antibody response (Szikora, J. P. et al. (1990) EMBO J. 9:1041-1050). A human homolog of P35B, FX, is a homodimeric NADP(H)-binding protein of 68 kDa. FX acts as a combined epimerase and NADPH-dependent reductase in converting GDP-4-keto-6-D-deoxymannose to GDP-L-fucose (Tonetti, M. et al. (1996) J. Biol. Chem. 271: 27274-27279). GDP-L-fucose is the substrate of several facosyl-transferases involved in the biosysthesis of blood group ABH antigenic determinants. GDP-L-fucose is also utilized in synthesizing fucosylated glycoproteins and glycolipids which function in cell adhesion and recognition (Springer, T. A. and Lasky, L. A. (1991) Nature 329: 196-197; Brandley, B. K. et al. (1990) Cell 63: 861-863; and Feizi, T. and Childs, R. A. (1987) Biochem. J. 245: 1-11).

[0007] Thus, there is a need for the identification and characterization of novel tissue specific polynucleotides and polypeptides which modulate activation and differentiation of cells, both normally and in disease states. In particular, there is a need to isolate and characterize additional molecules that mediate apoptosis, DNA repair, tumor-mediated angiogenesis, genetic imprinting, immune responses to tumors and tumor antigens and, among other things, that can play a role in detecting, preventing, ameliorating or correcting dysfunctions or diseases.

### SUMMARY OF THE INVENTION

[0008] The present invention includes isolated nucleic acid molecules comprising, or alternatively, consisting of, a cancer associated polynucleotide sequence disclosed in the sequence listing (as SEQ ID NOs:1 to 842) andlor contained in a human cDNA clone described in Tables 1, 2 and 5 and deposited with the American Type Culture Collection (“ATCC”). Fragments, variant, and derivatives of these nucleic acid molecules are also encompassed by the invention. The present invention also includes isolated nucleic acid molecules comprising, or alternatively consisting of, a polynucleotide encoding a cancer polypeptide. The present invention further includes cancer polypeptides encoded by these polynucleotides. Further provided for are amino acid sequences comprising, or alternatively consisting of, cancer polypeptides as disclosed in the sequence listing (as SEQ ID Nos: 843 to 1684) and/or encoded by a human cDNA clone described in Tables 1, 2 and 5 and deposited with the ATCC. Antibodies that bind these polypeptides are also encompassed by the invention. Polypeptide fragments, variants, and derivatives of these amino acid sequences are also encompassed by the invention, as are polynucleotides encoding these polypeptides and antibodies that bind these polypeptides. Also provided are diagnostic methods for diagnosing and treating, preventing, and/or prognosing disorders related to cancer, and therapeutic methods for treating such disorders. The invention further relates to screening methods for identifying agonists and antagonists of cancer antigens of the invention.

### DETAILED DESCRIPTION

[0009] Tables

[0010] Table 1 summarizes some of the cancer antigens encompassed by the invention (including contig sequences (SEQ ID NO:X) and the cDNA clone related to the contig sequence) and further summarizes certain characteristics of the cancer polynucleotides and the polypeptides encoded thereby. The first column shows the “SEQ ID NO:” for each of the 842 cancer antigen polynucleotide sequences of the invention. The second column provides a unique “Sequence/Contig ID” identification for each cancer associated sequence. The third column, “Gene Name,” and the fourth column, “Overlap,” provide a putative identification of the gene based on the sequence similarity of its translation product to an amino acid sequence found in a publicly accessible gene database and the database accession no. for the database sequence having similarity, respectively. The fifth and sixth columns provide the location (nucleotide position nos. within the contig), “Start” and “End”, in the polynucleotide sequence “SEQ ID NO:X” that delineate the preferred ORF shown in the sequence listing as SEQ ID NO:Y. The seventh and eighth columns provide the “% Id” (percent identity) and “% Si” (percent similarity), respectively, observed between the aligned sequence segments of the translation product of SEQ ID NO:X and the database sequence. The ninth column provides a unique “Clone ID” for a cDNA clone related to each contig sequence. The tenth column shows the tissue in which each SEQ ID NO:X is predominantly expressed.

[0011] Table 2 summarizes ATCC Deposits, Deposit dates, and ATCC designation numbers of deposits made with the ATCC in connection with the present application.

[0012] Table 3 indicates public ESTs, of which at least one, two, three, four, five, ten, fifteen or more of any one or more of these public EST sequences are optionally excluded from certain embodiments of the invention.

[0013] Table 4 lists residues comprising antigenic epitopes of antigenic epitope-bearing fragments present in most of the cancer associated polynucleotides described in Table 1 as predicted by the inventors using the algorithm of Jameson and Wolf, (1988) Comp. Appl. Biosci. 4:181-186. The Jameson-Wolf antigenic analysis was performed using the computer program PROTEAN (Version 3.11 for the Power Maclntosh, DNASTAR, Inc., 1228 South Park Street Madison, Wis.). Cancer associated polypeptides (e.g., SEQ ID NO:Y, polypeptides encoded by SEQ ID NO:X, or polypeptides encoded by the cDNA in the referenced cDNA clone) may possess one or more antigenic epitopes comprising residues described in Table 4. It will be appreciated that depending on the analytical criteria used to predict antigenic determinants, the exact address of the determinant may vary slightly. The residues and locations shown in column two of Table 4 correspond to the amino acid sequences for most cancer associated polypeptide sequence shown in the Sequence Listing.

[0014] Table 5 shows the cDNA libraries sequenced, and ATCC designation numbers and vector information relating to these cDNA libraries.

[0015] Definitions

[0016] The following definitions are provided to facilitate understanding of certain terms used throughout this specification.

[0017] In the present invention, “isolated” refers to material removed from its original environment (e.g., the natural environment if it is naturally occurring), and thus is altered “by the hand of man” from its natural state. For example, an isolated polynucleotide could be part of a vector or a composition of matter, or could be contained within a cell, and still be “isolated” because that vector, composition of matter, or particular cell is not the original environment of the polynucleotide. The term “isolated” does not refer to genomic or cDNA libraries, whole cell total or MRNA preparations, genomic DNA preparations (including those separated by electrophoresis and transferred onto blots), sheared whole cell genomic DNA preparations or other compositions where the art demonstrates no distinguishing features of the polynucleotide/sequences of the present invention.

[0018] As used herein, a “polynucleotide” refers to a molecule having a nucleic acid sequence contained in SEQ ID NO:X (as described in column 1 of Table 1) or the related cDNA clone (as described in column 9 of Table 1 and contained within a library deposited with the ATCC). For example, the polynucleotide can contain the nucleotide sequence of the full length cDNA sequence, including the 5′ and 3′ untranslated sequences, the coding region, as well as fragments, epitopes, domains, and variants of the nucleic acid sequence. Moreover, as used herein, a “polypeptide” refers to a molecule having an amino acid sequence encoded by a polynucleotide of the invention as broadly defined (obviously excluding poly-Phenylalanine or poly-Lysine peptide sequences which result from translation of a polyA tail of a sequence corresponding to a cDNA).

[0019] In the present invention, “SEQ ID NO:X” was often generated by overlapping sequences contained in multiple clones (contig analysis). A representative clone containing all or most of the sequence for SEQ ID NO:X is deposited at Human Genome Sciences, Inc. (HGS) in a catalogued and archived library. As shown in column 9 of Table 1, each clone is identified by a cDNA Clone ID. Each Clone ID is unique to an individual clone and the Clone ID is all the information needed to retrieve a given clone from the HGS library. In addition to the individual cDNA clone deposits, most of the cDNA libraries from which the clones were derived were deposited at the American Type Culture Collection (hereinafter “ATCC”). Table 5 provides a list of the deposited cDNA libraries. One can use the Clone ID to determine the library source by reference to Tables 2 and 5. Table 5 lists the deposited cDNA libraries by name and links each library to an ATCC Deposit. Library names contain four characters, for example, “HTWE.” The name of a cDNA clone (“Clone ID”) isolated from that library begins with the same four characters, for example “HTFWP07”. As mentioned below, Table 1 correlates the Clone ID names with SEQ ID NOs. Thus, starting with a SEQ ID NO, one can use Tables 1, 2 and 5 to determine the corresponding Clone ID, from which library it came and in which ATCC deposit the library is contained. Furthermore, it is possible to retrieve a given cDNA clone from the source library by techniques known in the art and described elsewhere herein. The ATCC is located at 10801 University Boulevard, Manassas, Va. 20110-2209, USA. The ATCC deposits were made persuant to the terms of the Budapest Treaty on the international recognition of the deposit of microorganisms for the purposes of patent procedure.

[0020] A “polynucleotide” of the present invention also includes those polynucleotides capable of hybridizing, under stringent hybridization conditions, to sequences contained in SEQ ID NO:X, or the complement thereof (e.g., the complement of any one, two, three, four, or more of the polynucleotide fragments described herein), and/or sequences contained in the related cDNA clone within a library deposited with the ATCC. “Stringent hybridization conditions” refers to an overnight incubation at 42 degree C in a solution comprising 50% formamide, 5× SSC (750 mM NaCl, 75 mM trisodium citrate), 50 mM sodium phosphate (pH 7.6), 5× Denhardt's solution, 10% dextran sulfate, and 20 μg/ml denatured, sheared salmon sperm DNA, followed by washing the filters in 0.1× SSC at about 65 degree C.

[0021] Also included within “polynucleotides” of the present invention are nucleic acid molecules that hybridize to the polynucleotides of the present invention at lower stringency hybridization conditions. Changes in the stringency of hybridization and signal detection are primarily accomplished through the manipulation of formainde concentration (lower percentages of formamide result in lowered stringency); salt conditions, or temperature. For example, lower stringency conditions include an overnight incubation at 37 degree C in a solution comprising 6× SSPE (20× SSPE=3M NaCl; 0.2M NaH₂PO₄; 0.02M EDTA, pH 7.4), 0.5% SDS, 30% formamide, 100 ug/ml salmon sperm blocking DNA; followed by washes at 50 degree C with 1× SSPE, 0.1% SDS. In addition, to achieve even lower stringency, washes performed following stringent hybridization can be done at higher salt concentrations (e.g. 5× SSC).

[0022] Note that variations in the above conditions may be accomplished through the inclusion and/or substitution of alternate blocking reagents used to suppress background in hybridization experiments. Typical blocking reagents include Denhardt's reagent, BLOTTO, heparin, denatured salmon sperm DNA, and commercially available proprietary formulations. The inclusion of specific blocking reagents may require modification of the hybridization conditions described above, due to problems with compatibility.

[0023] Of course, a polynucleotide which hybridizes only to polyA+ sequences (such as any 3′ terminal polyA+ tract of a cDNA shown in the sequence listing), or to a complementary stretch of T (or U) residues, would not be included in the definition of “polynucleotide,” since such a polynucleotide would hybridize to any nucleic acid molecule containing a poly (A) stretch or the complement thereof (e.g., practically any double-stranded cDNA clone generated using oligo dT as a primer).

[0024] The polynucleotides of the present invention can be composed of any polyribonucleotide or polydeoxribonucleotide, which may be unmodified RNA or DNA or modified RNA or DNA. For example, polynucleotides can be composed of single- and double-stranded DNA, DNA that is a mixture of single- and double-stranded regions, single- and double-stranded RNA, and RNA that is mixture of single- and double-stranded regions, hybrid molecules comprising DNA and RNA that may be single-stranded or, more typically, double-stranded or a mixture of single- and double-stranded regions. In addition, the polynucleotide can be composed of triple-stranded regions comprising RNA or DNA or both RNA and DNA. A polynucleotide may also contain one or more modified bases or DNA or RNA backbones modified for stability or for other reasons. “Modified” bases include, for example, tritylated bases and unusual bases such as inosine. A variety of modifications can be made to DNA and RNA; thus, “polynucleotide” embraces chemically, enzymatically, or metabolically modified forms.

[0025] In specific embodiments, the polynucleotides of the invention are at least 15, at least 30, at least 50, at least 100, at least 125, at least 500, or at least 1000 continuous nucleotides but are less than or equal to 300 kb, 200 kb, 100 kb, 50 kb, 15 kb, 10 kb, 7.5kb, 5 kb, 2.5 kb, 2.0 kb, or 1 kb, in length. In a further embodiment, polynucleotides of the invention comprise a portion of the coding sequences, as disclosed herein, but do not comprise all or a portion of any intron. In another embodiment, the polynucleotides comprising coding sequences do not contain coding sequences of a genomic flanking gene (i.e., 5′ or 3′ to the gene of interest in the genome). In other embodiments, the polynucleotides of the invention do not contain the coding sequence of more than 1000, 500, 250, 100, 50, 25, 20, 15, 10, 5, 4, 3, 2, or 1 genomic flanking gene(s).

[0026] “SEQ ID NO:X” refers to a tissue specific cancer antigen polynucleotide sequence described in Table 1. SEQ ID NO:X is identified by an integer specified in column 1 of Table 1. The polypeptide sequence SEQ ID NO:Y is a translated open reading frame (ORF) encoded by polynucleotide SEQ ID NO:X. There are 842 cancer antigen polynucleotide sequences described in Table 1 and shown in the sequence listing (SEQ ID NO:1 through SEQ ID NO:842). Likewise there are 842 polypeptide sequences shown in the sequence listing, one polypeptide sequence for each of the polynucleotide sequences (SEQ ID NO:843 through SEQ ID NO: 1684). The polynucleotide sequences are shown in the sequence listing immediately followed by all of the polypeptide sequences. Thus, a polypeptide sequence corresponding to polynucleotide sequence SEQ ID NO: 1 is the first polypeptide sequence shown in the sequence listing. The second polypeptide sequence corresponds to the polynucleotide sequence shown as SEQ ID NO:2, and so on. In otherwords, since there are842 polynucleotide sequences, for any polynucleotide sequence SEQ ID NO:X, a corresponding polypeptide SEQ ID NO:Y can be determined by the formula X+842=Y. In addition, any of the unique “Sequence/Contig ID” defined in column 2 of Table 1, can be linked to the corresponding polypeptide SEQ ID NO:Y by reference to Table 4.

[0027] The polypeptides of the present invention can be composed of amino acids joined to each other by peptide bonds or modified peptide bonds, i.e., peptide isosteres, and may contain amino acids other than the 20 gene-encoded amino acids. The polypeptides may be modified by either natural processes, such as posttranslational processing, or by chemical modification techniques which are well known in the art. Such modifications are well described in basic texts and in more detailed monographs, as well as in a voluminous research literature. Modifications can occur anywhere in a polypeptide, including the peptide backbone, the amino acid side-chains and the amino or carboxyl termini. It will be appreciated that the same type of modification may be present in the same or varying degrees at several sites in a given polypeptide. Also, a given polypeptide may contain many types of modifications. Polypeptides may be branched, for example, as a result of ubiquitination, and they may be cyclic, with or without branching. Cyclic, branched, and branched cyclic polypeptides may result from posttranslation natural processes or may be made by synthetic methods. Modifications include acetylation, acylation, ADP-ribosylation, amidation, covalent attachment of flavin, covalent attachment of a heme moiety, covalent attachment of a nucleotide or nucleotide derivative, covalent attachment of a lipid or lipid derivative, covalent attachment of phosphotidylinositol, cross-linking, cyclization, disulfide bond formation, demethylation, formation of covalent cross-links, formation of cysteine, formation of pyroglutamate, formylation, gamma-carboxylation, glycosylation, GPI anchor formation, hydroxylation, iodination, methylation, myristoylation, oxidation, pegylation, proteolytic processing, phosphorylation, prenylation, racemization, selenoylation, sulfation, transfer-RNA mediated addition of amino acids to proteins such as arginylation, and ubiquitination. (See, for instance, PROTEINS—STRUCTURE AND MOLECULAR PROPERTIES, 2nd Ed., T. E. Creighton, W. H. Freeman and Company, New York (1993); POSTTRANSLATIONAL COVALENT MODIFICATION OF PROTEINS, B. C. Johnson, Ed., Academic Press, New York, pgs. 1-12 (1983); Seifter et al., Meth Enzymol 182:626-646 (1990); Rattan et al., Ann NY Acad Sci 663:48-62 (1992).)

[0028] The cancer polypeptides of the invention can be prepared in any suitable manner. Such polypeptides include isolated naturally occurring polypeptides, recombinantly produced polypeptides, synthetically produced polypeptides, or polypeptides produced by a combination of these methods. Means for preparing such polypeptides are well understood in the art.

[0029] The polypeptides may be in the form of the secreted protein, including the mature form, or may be a part of a larger protein, such as a fusion protein (see below). It is often advantageous to include an additional amino acid sequence which contains secretory or leader sequences, pro-sequences, sequences which aid in purification, such as multiple histidine residues, or an additional sequence for stability during recombinant production.

[0030] The cancer polypeptides of the present invention are preferably provided in an isolated form, and preferably are substantially purified. A recombinantly produced version of a polypeptide, including the secreted polypeptide, can be substantially purified using techniques described herein or otherwise known in the art, such as, for example, by the one-step method described in Smith and Johnson, Gene 67:31-40 (1988). Polypeptides of the invention also can be purified from natural, synthetic or recombinant sources using techniques described herein or otherwise known in the art, such as, for example, antibodies of the invention raised against the polypeptides of the present invention in methods which are well known in the art.

[0031] By a polypeptide demonstrating a “functional activity” is meant, a polypeptide capable of displaying one or more known functional activities associated with a full-length (complete) protein of the invention. Such functional activities include, but are not limited to, biological activity, antigenicity [ability to bind (or compete with a polypeptide for binding) to an anti-polypeptide antibody], immunogenicity (ability to generate antibody which binds to a specific polypeptide of the invention), ability to form multimers with polypeptides of the invention, and ability to bind to a receptor or ligand for a polypeptide.

[0032] “A polypeptide having functional activity” refers to polypeptides exhibiting activity similar, but not necessarily identical to, an activity of a polypeptide of the present invention, including mature forms, as measured in a particular assay, such as, for example, a biological assay, with or without dose dependency. In the case where dose dependency does exist, it need not be identical to that of the polypeptide, but rather substantially similar to the dose-dependence in a given activity as compared to the polypeptide of the present invention (i.e., the candidate polypeptide will exhibit greater activity or not more than about 25-fold less and, preferably, not more than about tenfold less activity, and most preferably, not more than about three-fold less activity relative to the polypeptide of the present invention).

[0033] The functional activity of the cancer antigen polypeptides, and fragments, variants derivatives, and analogs thereof, can be assayed by various methods.

[0034] For example, in one embodiment where one is assaying for the ability to bind or compete with full-length polypeptide of the present invention for binding to an antibody to the full length polypeptide antibody, various immunoassays known in the art can be used, including but not limited to, competitive and non-competitive assay systems using techniques such as radioimmunoassays, ELISA (enzyme linked immunosorbent assay), “sandwich” immunoassays, immunoradiometric assays, gel diffusion precipitation reactions, immunodiffusion assays, in situ immunoassays (using colloidal gold, enzyme or radioisotope labels, for example), western blots, precipitation reactions, agglutination assays (e.g., gel agglutination assays, hemagglutination assays), complement fixation assays, immunofluorescence assays, protein A assays, and immunoelectrophoresis assays, etc. In one embodiment, antibody binding is detected by detecting a label on the primary antibody. In another embodiment, the primary antibody is detected by detecting binding of a secondary antibody or reagent to the primary antibody. In a further embodiment, the secondary antibody is labeled. Many means are known in the art for detecting binding in an immunoassay and are within the scope of the present invention.

[0035] In another embodiment, where a ligand is identified, or the ability of a polypeptide fragment, variant or derivative of the invention to multimerize is being evaluated, binding can be assayed, e.g., by means well-known in the art, such as, for example, reducing and non-reducing gel chromatography, protein affinity chromatography, and affinity blotting. See generally, Phizicky, E., et al., Microbiol. Rev. 59:94-123 (1995). In another embodiment, physiological correlates polypeptide of the present invention binding to its substrates (signal transduction) can be assayed.

[0036] In addition, assays described herein (see Examples) and otherwise known in the art may routinely be applied to measure the ability of polypeptides of the present invention and fragments, variants derivatives and analogs thereof to elicit polypeptide related biological activity (either in vitro or in vivo). Other methods will be known to the skilled artisan and are within the scope of the invention.

[0037] Cancer Associated Polynucleotides and Polypeptides of the Invention

[0038] It has been discovered herein that the polynucleotides described in Table 1 are expressed at significantly enhanced levels in human cancer tissues as shown in column 10 of Table 1. Accordingly, such polynucleotides, polypeptides encoded by such polynucleotides, and antibodies specific for such polypeptides find use in the prediction, diagnosis, prevention and treatment of tissue specific disorders, including cancer as more fully described below.

[0039] Table 1 summarizes some of the polynucleotides encompassed by the invention (including contig sequences (SEQ ID NO:X) and the related cDNA clones) and further summarizes certain characteristics of these tissue specific cancer associated polynucleotides and the polypeptides encoded thereby.

TABLE 1

| Seq | Sequence/ | | | HGS | | | | | |
|---|---|---|---|---|---|---|---|---|---|
| ID | Contig | | | Nucleotide | | % | % | | |
| No. | ID | Gene Name | Overlap | Start | End | Id | Si | Clone ID | Tissue(s) |

| | | | | | | | | | | | |
|---|---|---|---|---|---|---|---|---|---|---|---|
| 1 | 507291 | uvomorulin [Homo sapiens] >sp\|Q15855\|Q15855 | gi\|340185 | 2 | 475 | 100 | 100 | HCHAU23 | Pancreas, | | |
| | | UVOMORULIN PRECURSOR (E- | | | | | | | Breast/ | | |
| | | CADHERIN) (ARC-1/UVOMORULIN). | | | | | | | Ovarian | | |
| | | >gi\|930046 uvomorulin (140 AA) | | | | | | | | | |
| | | [Homo sapiens] {SUB 168-307} | | | | | | | | | |
| | | Length = 878 | | | | | | | | | |
| 2 | 508000 | HLA-B-associated transcript 2 (BAT2) [Homo | gi\|179339 | 100 | 1902 | 86 | 87 | HWAAK56 | Lung, | | |
| | | sapiens] >gi\|179345 HLA-B-associated transcript | | | | | | | Breast/ | | |
| | | 2 (BAT2) [Homo sapiens] >pir\|B35098\|B35098 | | | | | | | Ovarian | | |
| | | MHC class III histocompatibility antigen HLA-B- | | | | | | | | | |
| | | associated transcript 2 - human | | | | | | | | | |
| | | >sp\|P48634\|BAT2_HUMAN LARGE | | | | | | | | | |
| | | PROLINE-RICH P | | | | | | | | | |
| 3 | 518325 | | | 110 | 310 | | | HHFCP36 | Lung, | | |
| | | | | | | | | | Pancreas, | | |
| | | | | | | | | | Colon, | | |
| | | | | | | | | | Breast/ | | |
| | | | | | | | | | Ovarian | | |
| 4 | 523111 | Sm D2 [Homo sapiens] >pir\|I38861\|I38861 small | gi\|600748 | 233 | 670 | 88 | 88 | HATAE67 | Lung, | | |
| | | nuclear ribonucleoprotein chain D2 - human | | | | | | | Breast/ | | |
| | | Length = 118 | | | | | | | Ovarian | | |
| 5 | 526869 | (AC002291) Similar ATP-dependent RNA | gi\|2829912 | 1 | 552 | 67 | 77 | HT4FP57 | Pancreas, | | |
| | | Helicase [Arabidopsis thaliana] | | | | | | | Breast/ | | |
| | | >sp\|O49289\|O49289 SIMILAR ATP- | | | | | | | Ovarian | | |
| | | DEPENDENT RNA HELICASE. Length = 845 | | | | | | | | | |
| 6 | 532211 | retinoic acid-binding protein [Bos taurus] | gi\|162906 | 2 | 481 | 95 | 98 | HHGCV63 | Lung, | | |
| | | Length = 138 | | | | | | | Breast/ | | |
| | | | | | | | | | Ovarian | | |
| 7 | 532247 | | | 160 | 384 | | | HEBCC47 | Pancreas, | | |
| | | | | | | | | | Breast/ | | |
| | | | | | | | | | Ovarian | | |
| 8 | 537932 | alcohol dehydrogenase [Homo sapiens] | gi\|178130 | 1 | 1149 | 92 | 92 | HUSIB86 | Lung, | | |
| | | >gi\|178134 alcohol dehydrogenase 3 [Homo | | | | | | | Breast/ | | |
| | | sapiens] >pir\|JH0789\|DEHUC2 alcohol | | | | | | | Ovarian | | |
| | | dehydrogenase (EC 1.1.1.1)5 - human | | | | | | | | | |
| | | >sp\|P11766\|ADHX_HUMAN ALCOHOL | | | | | | | | | |
| | | DEHYDROGENASE CLASS III CHI | | | | | | | | | |
| | | CHAIN (EC 1.1.1.1) (GLUTATHIONE- | | | | | | | | | |
| | | DEPENDENT FOR | | | | | | | | | |
| 9 | 540117 | | | 174 | 635 | | | HRGBU25 | Lung, | | |
| | | | | | | | | | Breast/ | | |
| | | | | | | | | | Ovarian | | |
| 10 | 547710 | transketolase [Homo sapiens] Length = 623 | gi\|1297297 | 2 | 1189 | 92 | 92 | HMUAZ27 | Lung, | | |
| | | | | | | | | | Pancreas | | |
| 11 | 551747 | rtvp-1 [Homo sapiens] >pir\|JC5308\|JC5308 | gi\|1030053 | 26 | 931 | 91 | 91 | HTDAE10 | Lung, | | |
| | | testis-specific, vespid, and pathogenesis-related | | | | | | | Pancreas | | |
| | | protein 1 - human >sp\|P48060\|GLIP_HUMAN | | | | | | | | | |
| | | GLIOMA PATHOGENESIS-RELATED | | | | | | | | | |
| | | PROTEIN (RTVP-1 PROTEIN). Length = 266 | | | | | | | | | |
| 12 | 552799 | delta-aminolevulinate synthase (housekeeping) | gi\|28583 | 104 | 814 | 100 | 100 | HHECX90 | Lung, | | |
| | | [Homo sapiens] >pir\|S13682\|SYHUAL 5- | | | | | | | Pancreas, | | |
| | | aminolevulinate synthase (EC 2.3.1.37) 1 precursor - | | | | | | | Breast/ | | |
| | | human >sp\|P13196\|HEM1_HUMAN 5- | | | | | | | Ovarian | | |
| | | AMINOLEVULINIC ACID SYNTHASE | | | | | | | | | |
| | | MITOCHONDRIAL PRECURSOR, | | | | | | | | | |
| | | NONSPECIFIC (EC 2.3.1.37) (DELTA-AM | | | | | | | | | |
| 13 | 553243 | RING7 [Homo sapiens] >gi\|557702 HLA-DMB | gi\|313002 | 202 | 1017 | 93 | 93 | HUKDI44 | Lung, | | |
| | | [Homo sapiens] >gi\|512472 HLA-DMB [Homo | | | | | | | Pancreas | | |
| | | sapiens] >gi\|1054742 DMB [Homo sapiens] | | | | | | | | | |
| | | >pir\|I37533\|I37533 MHC class II histocompatibility | | | | | | | | | |
| | | antigen HLA-DM beta chain precursor - human | | | | | | | | | |
| | | Length = 263 | | | | | | | | | |
| 14 | 553368 | (AF053944) aortic carboxypeptidase-like protein | gi\|3288916 | 1 | 459 | 96 | 96 | HADGE84 | Lung, | | |
| | | ACLP [Homo sapiens] >sp\|G3288916\|G3288916 | | | | | | | Pancreas | | |
| | | AORTIC CARBOXYPEPTIDASE-LIKE PROTEIN | | | | | | | | | |
| | | ACLP. >gnl\|PID\|d1013781 AEBP1 [Homo | | | | | | | | | |
| | | sapiens] { SUB 314-1158} Length = 1158 | | | | | | | | | |
| 15 | 554349 | | | 3 | 776 | | | HUSGK19 | Lung, | | |
| | | | | | | | | | Pancreas | | |
| 16 | 558491 | immunoglobulin heavy chain [Homo sapiens] | gi\|567128 | 1 | 429 | 98 | 100 | HUFCN61 | Lung, | | |
| | | Length = 152 | | | | | | | Pancreas, | | |
| | | | | | | | | | Colon | | |
| 17 | 558983 | dJ6802.2 [Homo sapiens] | gnl\|PID\|e1294465 | 219 | 623 | 100 | 100 | HOHBM82 | Pancreas, | | |
| | | >sp\|P35579\|MYSN_HUMAN MYOSIN HEAVY | | | | | | | Breast/ | | |
| | | CHAIN, NONMUSCLE TYPE A (CELLULAR | | | | | | | Ovarian | | |
| | | MYOSIN HEAVY CHAIN, TYPE A) (NMMHC- | | | | | | | | | |
| | | A). >gi\|553596 cellular myosin heavy chain | | | | | | | | | |
| | | [Homo sapiens] {SUB 1-1337} Length = 1960 | | | | | | | | | |
| 18 | 572943 | | | 367 | 522 | | | HBAMC47 | Pancreas, | | |
| | | | | | | | | | Breast/ | | |
| | | | | | | | | | Ovarian | | |
| 19 | 585892 | epithelial tumor antigen precursor, membrane- | pir\|S10572\| | 3 | 965 | 89 | 89 | HUKAL69 | Lung, | | |
| | | bound form - human Length = 515 | S10572 | | | | | | Pancreas, | | |
| | | | | | | | | | Colon, | | |
| | | | | | | | | | Breast/ | | |
| | | | | | | | | | Ovarian | | |
| 20 | 589390 | C1 inhibitor [Homo sapiens] >gi\|29535 C1 inhibitor | gnl\|PID\|e222400 | 3 | 983 | 96 | 96 | HSRAB10 | Lung, | | |
| | | [Homo sapiens] >pir\|S15386\|ITHUC1 complement | | | | | | | Pancreas | | |
| | | C1 inhibitor precursor - human | | | | | | | | | |
| | | >sp\|P05155\|IC1_HUMAN PLASMA PROTEASE | | | | | | | | | |
| | | C1 INHIBITOR PRECURSOR (C1 INH). | | | | | | | | | |
| | | >gnl\|PID\|e3783 C1 inhibitor (AA 155-478) (1 is | | | | | | | | | |
| | | 2nd base i | | | | | | | | | |
| 21 | 596882 | | | 800 | 1057 | | | HMCEP91 | Lung, | | |
| | | | | | | | | | Pancreas, | | |
| | | | | | | | | | Colon | | |
| 22 | 616289 | nucleoporin p58 [Rattus norvegicus] | gi\|1537068 | 1 | 390 | 67 | 70 | HAJCB44 | Lung, | | |
| | | >sp\|P70581\|P70581 NUCLEOPORIN P58. Length = | | | | | | | Pancreas | | |
| | | 585 | | | | | | | | | |
| 23 | 622140 | selenophosphate synthetase 2 [Homo sapiens] | gi\|1815622 | 92 | 325 | 97 | 97 | HEONC67 | Pancreas, | | |
| | | >sp\|Q99611\|Q99611 SELENOPHOSPHATE | | | | | | | Breast/ | | |
| | | SYNTHETASE 2. Length = 448 | | | | | | | Ovarian | | |
| 24 | 623566 | karyopherin alhph 3 [Homo sapiens] | gnl\|PID\| | 66 | 1652 | 99 | 99 | HDPPP20 | Lung, | | |
| | | >sp\|O00505\|IMA3_HUMAN IMPORTIN ALPHA- | d1021210 | | | | | | Breast/ | | |
| | | 3 SUBUNIT (KARYOPHERIN ALPHA-3 | | | | | | | Ovarian | | |
| | | SUBUNIT). Length = 521 | | | | | | | | | |
| 25 | 647714 | | | 1 | 711 | | | HSSEH29 | Pancreas, | | |
| | | | | | | | | | Breast/ | | |
| | | | | | | | | | Ovarian | | |
| 26 | 647752 | ubiquitin conjugating-protein [Oryctolagus | gi\|165780 | 3 | 590 | 100 | 100 | HDTDH46 | Lung, | | |
| | | cuniculus] >gi\|184046 HHR6B (Human homologue | | | | | | | Colon | | |
| | | of yeast RAD 6); putative [Homo sapiens] | | | | | | | | | |
| | | >gi \|30954 E2 protein [Homo sapiens] >gi\|207555 | | | | | | | | | |
| | | ubiquitin conjugating-protein [Rattus norvegicus] | | | | | | | | | |
| | | >gnl\|PID\|e233515 HR6B gene pr | | | | | | | | | |
| 27 | 651774 | P58 [Homo sapiens] >pir\|568363\|S68363 protein | gi\|1147739 | 1 | 1632 | 96 | 96 | HDPAA15 | Lung, | | |
| | | disulfide-isomerase (EC 5.3.4.1) ER60 precursor - | | | | | | | Pancreas, | | |
| | | human >sp\|P3010\|ER60_HUMAN PROBABLE | | | | | | | Breast/ | | |
| | | PROTEIN DISULFIDE ISOMERASE ER-60 | | | | | | | Ovarian | | |
| | | PRECURSOR (EC 5.3.4.1) (ERP60) (58 KD | | | | | | | | | |
| | | MICROSOMAL PROTEIN) (P58) (GRP58) | | | | | | | | | |
| | | (ERP57). Length | | | | | | | | | |
| 28 | 651995 | collagen [Mus musculus] >pir\|S23779\|S23779 | gnl\|PID\|e245912 | 3 | 335 | 90 | 95 | HBTAD44 | Lung, | | |
| | | collagen alpha 1 (VIII) chain - mouse | | | | | | | Pancreas | | |
| | | >sp\|Q00780\|CA18_MOUSE COLLAGEN ALPHA | | | | | | | | | |
| | | 1(VIII) CHAIN PRECURSOR. >bbs\|134935 alpha | | | | | | | | | |
| | | 1-VIII collagen [rats, mesangial cell, Peptide Partial, | | | | | | | | | |
| | | 172 aa] [Rattus sp.] {SUB 399-570} Leng | | | | | | | | | |
| 29 | 652156 | phospholipid hydroperoxide glutathione peroxidase | gi\|825667 | 262 | 633 | 94 | 94 | HOEBK80 | Lung, | | |
| | | [Homo sapiens] >sp\|O43381\|O43381 | | | | | | | Breast/ | | |
| | | GSHH_HUMAN (EC 1.11.1.9) (GLUTATHIONE | | | | | | | Ovarian | | |
| | | PEROXIDASE). >gi\|3399677 (AC005390) | | | | | | | | | |
| | | GSSH_HUMAN, partial CDS [Homo sapiens] | | | | | | | | | |
| | | {SUB 149-197} Length = 197 | | | | | | | | | |
| 30 | 653010 | | | 79 | 183 | | | HSRAA58 | Lung, | | |
| | | | | | | | | | Pancreas | | |
| 31 | 655904 | von Willebrand factor [Homo sapiens] | gi\|340356 | 632 | 1891 | 96 | 96 | HSEBB94 | Lung, | | |
| | | >pir\|A34480\|VWHU von Willebrand factor | | | | | | | Breast/ | | |
| | | precursor - human >gi\|553810 von Willebrand factor | | | | | | | Ovarian | | |
| | | [Homo sapiens] {SUB 990-1947} >gnl\|PID\| | | | | | | | | | |
| | | e222518 von Willebrand factor [Homo sapiens] | | | | | | | | | |
| | | {SUB 1-178} >gi\|340316 von Willebrand antige | | | | | | | | | |
| 32 | 657852 | | | 70 | 522 | | | HCHAL14 | Colon, | | |
| | | | | | | | | | Breast/ | | |
| | | | | | | | | | Ovarian | | |
| 33 | 666414 | | | 1 | 285 | | | HOSFG18 | Lung, | | |
| | | | | | | | | | Pancreas | | |
| 34 | 667847 | ribosomal protein S9 [Rattus norvegicus] | gi\|571431 | 714 | 98 | 98 | HCFLJ62 | Lung, | | | |
| | | >pir\|JN0587\|S21497 ribosomal protein S9 - rat | | | | | | | Pancreas, | | |
| | | Length = 194 | Breast/ | | | | | | | | |
| | | | | | | | | | Ovarian | | |
| 35 | 670188 | G protein gamma-10 subunit [Homo sapiens] | gi\|995919 | 2 | 238 | 100 | 100 | HWADR30 | Lung, | | |
| | | >pir\|I39158\|I39158 GTP-binding regulatory protein | | | | | | | Pancreas | | |
| | | gamma-10 chain - human | | | | | | | | | |
| | | >sp\|P50151\|GBGA_HUMAN GUANINE | | | | | | | | | |
| | | NUCLEOTIDE-BINDING PROTEIN | | | | | | | | | |
| | | G(I)/G(S)/G(O) GAMMA-10 SUBUNIT. Length = | | | | | | | | | |
| | | 68 | | | | | | | | | |
| 36 | 670279 | ribosomal protein S24 [Homo sapiens] >gi\|517222 | gi\|337506 | 96 | 503 | 87 | 87 | HSAYG46 | Lung, | | |
| | | ribosomal protein S24 [Homo sapiens] >gi\|49652 | | | | | | | Pancreas, | | |
| | | ribosomal protein S19 (AA 1-133) [Mesocricetus | | | | | | | Breast/ | | |
| | | auratus] >gi\|57858 ribosomal protein 824 [Rattus | | | | | | | Ovarian | | |
| | | norvegicus] >gi\|57722 ribosomal protein S24 (AA 1- | | | | | | | | | |
| | | 133) [Rattus | | | | | | | | | |
| 37 | 670729 | acidic ribosomal phosphoprotein (P1) [Homo | gi\|190234 | 74 | 496 | 100 | 100 | H2CBM17 | Lung, | | |
| | | sapiens] >pir\|B27125\|R6HUP1 acidic ribosomal | | | | | | | Pancreas, | | |
| | | protein P1 - human Length = 114 | | | | | | | Colon, | | |
| | | | | | | | | | Breast/ | | |
| | | | | | | | | | Ovarian | | |
| 38 | 674123 | | | 40 | 438 | | | HYACJ55 | Lung, | | |
| | | | | | | | | | Pancreas | | |
| 39 | 676496 | collagen type VI, alpha 3 chain [Homo sapiens] | gnl\|PID\|e1292418 | 250 | 1029 | 98 | 98 | HSLIC82 | Lung, | | |
| | | >sp\|E1292418\|E1292418 COLLAGEN TYPE VI, | | | | | | | Pancreas | | |
| | | ALPHA 3 CHAIN. Length = 3176 | | | | | | | | | |
| 40 | 678162 | TAXREB107 [Homo sapiens] >pir\|I51803\|I51803 | gnl\|PID\|d1005017 | 528 | 974 | 100 | 100 | HBJJA02 | Lung, | | |
| | | TAXREB107 - human Length = 288 | | | | | | | Pancreas, | | |
| | | | | | | | | | Breast/ | | |
| | | | | | | | | | Ovarian | | |
| 41 | 678248 | dolichol-phosphate-mannose synthase [Homo | gnl\|PID\|d1026577 | 3 | 770 | 100 | 100 | HMTAK71 | Lung, | | |
| | | sapiens] >sp\|O60762\|O60762 DOLICHOL- | | | | | | | Pancreas | | |
| | | PHOSPHATE-MANNOSE SYNTHASE. | | | | | | | | | |
| | | >gnl\|PID\|d1026578 dolichol-phosphate-mannose | | | | | | | | | |
| | | synthase [Homo sapiens] {SUB 1-120} Length = | | | | | | | | | |
| | | 260 | | | | | | | | | |
| 42 | 683668 | alpha 1 (I) chain propeptide [Homo sapiens] | gi\|180392 | 566 | 1912 | 94 | 94 | HWHGV07 | Lung, | | |
| | | >gi\|180380 alpha-1 type I collagen [Homo sapiens] | | | | | | | Pancreas, | | |
| | | {SUB 64-201} Length = 1040 | | | | | | | Breast/ | | |
| | | | | | | | | | Ovarian | | |
| 43 | 693172 | Q1Z 7F5 [Homo sapiens] >gi\|189266 may code for | gi\|184407 | 23 | 214 | 97 | 100 | HNHIW05 | Lung, | | |
| | | Wilm's tumor-related protein [Homo sapiens] | | | | | | | Pancreas, | | |
| | | >gi\|190814 Wilms tumor-related protein [Homo | | | | | | | Breast/ | | |
| | | sapiens] >gi\|120397l QM gene product [Homo | | | | | | | Ovarian | | |
| | | sapiens] >bbs\|135740 QM [human, nontumorigenic | | | | | | | | | |
| | | Wilm's microcell hybrid c | | | | | | | | | |
| 44 | 694303 | | | 2824 | 3219 | | | HOGAV47 | Lung, | | |
| | | | | | | | | | Breast/ | | |
| | | | | | | | | | Ovarian | | |
| 45 | 695042 | Description: KRAB zinc finger protein; this is a | gi\|1049295 | 471 | 680 | 74 | 91 | HISBX26 | Pancreas, | | |
| | | splicing variant that contains a stop codon and frame | | | | | | | Breast/ | | |
| | | shift between the KRAB box and the zinc finger | | | | | | | Ovarian | | |
| | | region; Method: conceptual translation supplied by | | | | | | | | | |
| | | author [Homo sapiens] >sp\|Q13359\|Q13359 | | | | | | | | | |
| | | KRAB ZINC FING | | | | | | | | | |
| 46 | 699799 | lipocortin (AA 1-346) [Homo sapiens] | gi\|34388 | 3 | 1121 | 100 | 100 | HNDAA51 | Lung, | | |
| | | >pir\|A03080\|LUHU annexin I - human | | | | | | | Breast/ | | |
| | | >sp\|P04083\|ANX1_HUMAN ANNEXIN I | | | | | | | Ovarian | | |
| | | (LIPOCORTIN I) (CALPACTIN II) | | | | | | | | | |
| | | (CHROMOBINDIN 9) (P35) (PHOSPHOLIPASE | | | | | | | | | |
| | | A2 INHIBITORY PROTEIN). {SUB 2-346} | | | | | | | | | |
| | | Length = 346 | | | | | | | | | |
| 47 | 702216 | dihydrodiol dehydrogenase [Homo sapiens] | gi\|452484 | 41 | 1048 | 95 | 95 | HNALC11 | Lung, | | |
| | | >gi\|487135 hepatic dihydrodiol dehydrogenase | | | | | | | Pancreas | | |
| | | [Homo sapiens] >gi\|181549 dihydrodiol | | | | | | | | | |
| | | dehydrogenase [Homo sapiens] | | | | | | | | | |
| | | >pir\|A53436\|A53436 3-alpha-hydroxysteroid/ | | | | | | | | | |
| | | dihydrodiol dehydrogenase (EC 1.1.1.-) - human | | | | | | | | | |
| | | >sp\|Q04828\|DB | | | | | | | | | |
| 48 | 703015 | latent transforming growth factor-beta-binding | pir\|A55494\| | 3 | 587 | 100 | 100 | HGCOX28 | Lung, | | |
| | | protein - human Length = 1820 | A55494 | | | | | | Pancreas | | |
| 49 | 706391 | vacuolar H+ ATPase proton channel subunit [Homo | gi\|189676 | 29 | 622 | 85 | 85 | HMABL73 | Lung, | | |
| | | sapiens] >pir\|A39367\|A39367 H+-transporting | | | | | | | Breast/ | | |
| | | ATPase (EC 3.6.1.35) chain PKD1 - human | | | | | | | Ovarian | | |
| | | Length = 155 | | | | | | | | | |
| 50 | 706892 | copper transport protein HAH1 [Homo sapiens] | gi\|1945365 | 3 | 287 | 82 | 82 | HUFDS83 | Lung, | | |
| | | >sp\|O00244\|O00244 COPPER TRANSPORT | | | | | | | Breast/ | | |
| | | PROTEIN HAH1. Length = 68 | | | | | | | Ovarian | | |
| 51 | 706924 | | | 2847 | 3215 | | | HRAEB20 | Lung, | | |
| | | | | | | | | | Breast/ | | |
| | | | | | | | | | Ovarian | | |
| 52 | 707642 | ribosomal protein L8 [Homo sapiens] >gi\|57704 | gi\|433899 | 1 | 516 | 94 | 94 | HSRDJ44 | Lung, | | |
| | | ribosomal protein L8 [Rattus rattus] >gi\|1527178 | | | | | | | Pancreas, | | |
| | | ribosomal protein L8 [Mus musculus] | | | | | | | Colon, | | |
| | | >pir\|JU0177\|R5RTL8 ribosomal protein L8, | | | | | | | Breast/ | | |
| | | cytosolic - rat >pir\|JN0923\|JN0923 ribosomal protein | | | | | | | Ovarian | | |
| | | L8, cytosolic - human >gi\|3851 | | | | | | | | | |
| 53 | 710369 | | | 99 | 611 | | | HSPAI81 | Lung, | | |
| | | | | | | | | | Pancreas, | | |
| | | | | | | | | | Breast/ | | |
| | | | | | | | | | Ovarian | | |
| 54 | 718826 | | | 581 | 877 | | | HSIFK68 | Lung, | | |
| | | | | | | | | | Breast/ | | |
| | | | | | | | | | Ovarian | | |
| 55 | 719790 | lipocortin II [Homo sapiens] >pir\|A23942\|LUHU36 | gnl\|PID\|d1000439 | 3 | 869 | 98 | 98 | HKABK62 | Lung, | | |
| | | annexin II - human >sp\|P07355\|ANX2_HUMAN | | | | | | | Pancreas | | |
| | | ANNEXIN II (LIPOCORTIN II) (CALPACTIN I | | | | | | | | | |
| | | HEAVY CHAIN) (CHROMOBINDIN 8) (P36) | | | | | | | | | |
| | | (PROTEIN I) (PLACENTAL ANTICOAGULANT | | | | | | | | | |
| | | PROTEIN IV) (PAP-IV). {SUB 2-339} | | | | | | | | | |
| | | >sp\|G545587\|G545587 | | | | | | | | | |
| 56 | 720222 | homology with 16.7 KD putative viral protein | gnl\|PID\|e1346018 | 34 | 729 | 45 | 60 | HSKEP04 | Lung, | | |
| | | YUB1_NPVAC [Caenorhabditis elegans] Length = | | | | | | | Pancreas, | | |
| | | 250 | | | | | | | Breast/ | | |
| | | | | | | | | | Ovarian | | |
| 57 | 724033 | | | 1 | 654 | | | HPJBV92 | Lung, | | |
| | | | | | | | | | Pancreas, | | |
| | | | | | | | | | Breast/ | | |
| | | | | | | | | | Ovarian | | |
| 58 | 724767 | epsilon isoform of 61 kDa regulatory subunit of | gnl\|PID\|e220196 | 71 | 526 | 100 | 100 | HKABH59 | Lung, | | |
| | | PP2A [Homo sapiensi >gi\|1478070 protein | | | | | | | Breast/ | | |
| | | phosphatase B56-epsilon [Homo sapiens] | | | | | | | Ovarian | | |
| | | >sp\|Q16537\|Q16537 EPSILON ISOFORM OF | | | | | | | | | |
| | | 61 KDA REGULATORY SUBUNIT OF PP2A. | | | | | | | | | |
| | | >gi\|1022892 protein phosphatase PP2A0 B′ subunit | | | | | | | | | |
| | | delta is | | | | | | | | | |
| 59 | 727065 | ATPase [Homo sapiens] Length = 617 | gi\|291868 | 228 | 1010 | 99 | 99 | HELGY15 | Lung, | | |
| | | | | | | | | | Pancreas | | |
| 60 | 727246 | (AB009282) cytochrome b5 [Homo sapiens] | gnl\|PID\|d1024640 | 3 | 509 | 96 | 98 | HCFMH52 | Lung, | | |
| | | >sp\|O43169\|O43169 CYTOCHROME B5 | | | | | | | Colon | | |
| | | (FRAGMENT). Length = 146 | | | | | | | | | |
| 61 | 727932 | | | 41 | 199 | | | HLJDO53 | Lung, | | |
| | | | | | | | | | Breast/ | | |
| | | | | | | | | | Ovarian | | |
| 62 | 731167 | Sec23 protein [Homo sapiens] Length = 765 | gnl\|PID\|e236013 | 1 | 987 | 99 | 99 | HDTEM51 | Lung, | | |
| | | | | | | | | | Pancreas | | |
| 63 | 732514 | lysophosphatidic acid acyltransferase-alpha [Homo | gi\|2155238 | 3 | 794 | 99 | 99 | HLDBX26 | Pancreas, | | |
| | | sapiens] >gi\|2253613 putative lysophospholipid | | | | | | | Prostate | | |
| | | acyltransferase [Homo sapiens] >gnl\|PID\|e286645 | | | | | | | | | |
| | | 1-acylglycerol-3-phosphate O-acyltransferase [Homo | | | | | | | | | |
| | | sapiens] >sp\|Q99943\|PLCA_HUMAN 1-ACYL-SN- | | | | | | | | | |
| | | GLYCEROL-3-PHOSPHA | | | | | | | | | |
| 64 | 734080 | | | 1 | 567 | | | HFIBK44 | Lung, | | |
| | | | | | | | | | Breast/ | | |
| | | | | | | | | | Ovarian | | |
| 65 | 734288 | cysteinyl-tRNA synthetase [Homo sapiens] | gi\|927229 | 154 | 2067 | 99 | 99 | HKABU01 | Lung, | | |
| | | Length = 595 | | | | | | | Pancreas | | |
| 66 | 739448 | Nascent polypeptide associated complex alpha | gi\|556642 | 441 | 1184 | 82 | 82 | HKGAT31 | Lung, | | |
| | | subunit [Homo sapiens] >gi\|4092060 (AF054187) | | | | | | | Breast/ | | |
| | | alpha NAC [Homo sapiens] >pir\|S49326\|S49326 | | | | | | | Ovarian | | |
| | | Nascent polypeptide associated complex alpha | | | | | | | | | |
| | | chain - human >sp\|Q13765\|Q13765 NASCENT | | | | | | | | | |
| | | POLYPEPTIDE ASSOCIATED COMPLEX ALPH | | | | | | | | | |
| 67 | 739668 | | | 2 | 484 | | | HAPTL07 | Lung, | | |
| | | | | | | | | | Pancreas | | |
| 68 | 740060 | Diff33 gene product [Homo sapiens] | gi\|1293563 | 76 | 1536 | 94 | 94 | HMEGB82 | Lung, | | |
| | | >sp\|Q13530\|Q13530 PLACENTAL PROTEIN | | | | | | | Pancreas | | |
| | | DIFF33. Length = 494 | | | | | | | | | |
| 69 | 741560 | | | 3 | 296 | | | HCGMI12 | Lung, | | |
| | | | | | | | | | Colon | | |
| 70 | 742543 | human gamma-glutamyl hydrolase [Homo sapiens] | gi\|2951931 | 187 | 804 | 99 | 100 | HE2BG62 | Lung, | | |
| | | >sp\|Q92820\|Q92820 HUMAN GAMMA- | | | | | | | Colon, | | |
| | | GLUTAMYL HYDROLASE (EC 3.4.22.12). | | | | | | | Breast/ | | |
| | | Length = 318 | | | | | | | Ovarian | | |
| 71 | 742831 | | | 25 | 297 | | | HCDAL47 | Pancreas, | | |
| | | | | | | | | | Colon | | |
| 72 | 745327 | channel-like integral membrane protein [Homo | gi\|180501 | 1 | 534 | 98 | 98 | HWHPM73 | Lung, | | |
| | | sapiens] >gi\|1314304 channel-like integral | | | | | | | Pancreas | | |
| | | membrane protein [Homo sapiens] | | | | | | | | | |
| | | >pir\|A41616\|A4l616 erythrocyte integral membrane | | | | | | | | | |
| | | protein 28K - human >sp\|P29972\|AQP1_HUMAN | | | | | | | | | |
| | | AQUAPORIN-CHIP (WATER CHANNEL | | | | | | | | | |
| | | PROTEIN FOR RE | | | | | | | | | |
| 73 | 745695 | Mac-2 binding protein [Homo sapiens] >gi\|483474 | gi\|307153 | 886 | 2016 | 98 | 98 | HOPBN02 | Lung, Pancreas | | |
| | | 90K gene product [Homo sapiens] | | | | | | | | | |
| | | >pir\|A47161\|A47161 Mac-2-binding glycoprotein | | | | | | | | | |
| | | precursor - human >sp\|Q08380\|Q08380 MAC-2 | | | | | | | | | |
| | | BINDING PROTEIN PRECURSOR. Length = 585 | | | | | | | | | |
| 74 | 750316 | (AF029890) hepatitis B virus X interacting protein | gi\|2745883 | 99 | 398 | 100 | 100 | HKMLD65 | Lung, | | |
| | | [Homo sapiens] >sp\|O43S04\|O43504 HEPATITIS B | | | | | | | Pancreas, | | |
| | | VIRUS X INTERACTING PROTEIN. Length = 91 | | | | | | | Breast/ | | |
| | | | | | | | | | Ovarian | | |
| 75 | 750522 | | | 172 | 906 | | | HUKFI58 | Lung, | | |
| | | | | | | | | | Pancreas, | | |
| | | | | | | | | | Colon, | | |
| | | | | | | | | | Breast/ | | |
| | | | | | | | | | Ovarian | | |
| 76 | 750583 | | | 58 | 189 | | | HBJJB66 | Lung, | | |
| | | | | | | | | | Breast/ | | |
| | | | | | | | | | Ovarian | | |
| 77 | 751020 | | | 1 | 480 | | | HEBAE80 | Lung, | | |
| | | | | | | | | | Breast/ | | |
| | | | | | | | | | Ovarian | | |
| 78 | 752196 | | | 1 | 120 | | | HL1AL67 | Pancreas, | | |
| | | | | | | | | | Prostate | | |
| 79 | 753084 | UGTrel1 [Homo sapiens] >pir\|JC5024\|JC5024 UDP- | gi\|1669560 | 53 | 1168 | 87 | 87 | HDPKG74 | Lung, | | |
| | | galactose transporter related isozyme I - human | | | | | | | Pancreas | | |
| | | >sp\|P78383\|P78383 UGTREL1. Length = 322 | | | | | | | | | |
| 80 | 754957 | The ha1237 gene product is related to S. pombe rad21 | gnl\|PID\|d1008135 | 242 | 1330 | 94 | 94 | HWBGB01 | Lung, | | |
| | | rad21 gene product. [Homo sapiens] Length = 631 | | | | | | | Pancreas | | |
| 81 | 756557 | myosin I heavy chain [Rattus norvegicus] | gi\|56733 | 1 | 888 | 94 | 94 | HE8AF67 | Lung, | | |
| | | >pir\|A45439\|A45439 myosin I heavy chain - rat | | | | | | | Pancreas, | | |
| | | >sp\|Q05096\|Q05096 MYOSIN HEAVY CHAIN 1. | | | | | | | Colon, | | |
| | | Length = 1136 | | | | | | | Breast/ | | |
| | | | | | | | | | Ovarian | | |
| 82 | 756712 | | | 1457 | 1729 | | | HSYBW76 | Lung, | | |
| | | | | | | | | | Pancreas | | |
| 83 | 757414 | 5-lipoxygenase activating protein [Homo sapiens] | gi\|182658 | 1 | 477 | 99 | 100 | HCABA08 | Lung, | | |
| | | >pir\|A39824\|A39824 5-lipoxygenase-activating | | | | | | | Colon | | |
| | | protein - human >sp\|P20292\|FLAP_HUMAN 5- | | | | | | | | | |
| | | LIPOXYGENASE ACTIVATING PROTEIN | | | | | | | | | |
| | | (FLAP) (MK-886-BINDING PROTEIN). Length = | | | | | | | | | |
| | | 161 | | | | | | | | | |
| 84 | 757614 | tetratricopeptide repeat protein [Homo sapiens] | gi\|1688074 | 83 | 991 | 100 | 100 | HMEJS13 | Lung, | | |
| | | >sp\|Q99614\|Q99614 TETRATRICOPEPTIDE | | | | | | | Pancreas, | | |
| | | REPEAT PROTEIN. Length = 292 | | | | | | | Breast/ | | |
| | | | | | | | | | Ovarian | | |
| 85 | 757815 | (AF038604) contains similarity to Drosophila | gi\|2702370 | 2 | 988 | 58 | 81 | HCHOL74 | Lung, | | |
| | | ovarian tumor locus protein (GB:X13693) | | | | | | | Breast/ | | |
| | | [Caenorhabditis elegans] >sp\|O44438\|O44438 | | | | | | | Ovarian | | |
| | | B0546.2 PROTEIN. Length = 346 | | | | | | | | | |
| 86 | 759878 | nuclear pore complex protein NUP107 [Rattus | gi\|510717 | 526 | 1833 | 86 | 88 | HNTAP78 | Lung, | | |
| | | norvegicus] >pir\|A54142\|A54142 nucleoporin | | | | | | | Breast/ | | |
| | | NUP107 - rat >sp\|P52590\|N107_RAT NUCLEAR | | | | | | | Ovarian | | |
| | | PORE COMPLEX PROTEIN NUP107 | | | | | | | | | |
| | | (NUCLEOPORIN NUP107) (107 KD | | | | | | | | | |
| | | NUCLEOPORIN) (P105). Length = 926 | | | | | | | | | |
| 87 | 760227 | (AC003040) putative nicotinate | gi\|3242705 | 2 | 484 | 52 | 71 | HCHMM71 | Pancreas, | | |
| | | phosphoribosyltransferase [Arabidopsis thaliana] | | | | | | | Breast/ | | |
| | | >sp\|O80459\|O80459 PUTATIVE NICOTINATE | | | | | | | Ovarian | | |
| | | PHOSPHORIBOSYLTRANSFERASE. Length = | | | | | | | | | |
| | | 574 | | | | | | | | | |
| 88 | 760312 | chondroitin sulfate proteoglycan versican V0 splice- | gi\|608515 | 993 | 3215 | 99 | 99 | HMVDD07 | Lung, | | |
| | | variant precursor peptide [Homo sapiens] | | | | | | | Pancreas | | |
| | | >sp\|P13611\|PGCV_HUMAN VERSICAN CORE | | | | | | | | | |
| | | PROTEIN PRECURSOR (LARGE FIBROBLAST | | | | | | | | | |
| | | PROTEOGLYCAN) (CHONDROITIN SULFATE | | | | | | | | | |
| | | PROTEOGLYCAN CORE PROTEIN 2) (GLIAL | | | | | | | | | |
| | | HYALURONATE- BINDIN | | | | | | | | | |
| 89 | 766051 | | | 1 | 627 | | | HMAFA79 | Lung, | | |
| | | | | | | | | | Breast/ | | |
| | | | | | | | | | Ovarian | | |
| 90 | 767593 | | | 327 | 497 | | | HCECT76 | Pancreas, | | |
| | | | | | | | | | Colon | | |
| 91 | 768053 | (AF039688) antigen NY-CO-3 [Homo sapiens] | gi\|3170176 | 251 | 625 | 99 | 99 | HTPEH71 | Pancreas, | | |
| | | >sp\|O60525\|O60525 ANTIGEN NY-CO-3 | | | | | | | Breast/ | | |
| | | (FRAGMENT). Length = 192 | | | | | | | Ovarian | | |
| 92 | 768055 | ATP synthase gamma-subunit EHomo sapiens] | gnl\|PID\|d1004511 | 32 | 949 | 100 | 100 | HAJAQ70 | Lung, | | |
| | | >gnl\|PID\|d1004512 ATP synthase gamma-subunit | | | | | | | Pancreas | | |
| | | [Homo sapiens] >pir\|A49108\|A49108 H+- | | | | | | | | | |
| | | transporting ATP synthase (EC 3.6.1.34) gamma | | | | | | | | | |
| | | chain - human >sp\|P36542\|ATPG_HUMAN ATP | | | | | | | | | |
| | | SYNTHASE GAMMA CHAIN, | | | | | | | | | |
| | | MITOCHONDRIAL PRECURSOR | | | | | | | | | |
| 93 | 769685 | src-like tyrosine kinase (put.); putative [Homo | gi\|338228 | 1005 | 1409 | 100 | 100 | HRADN48 | Lung, | | |
| | | sapiens] Length = 537 | | | | | | | Pancreas, | | |
| | | | | | | | | | Colon, | | |
| | | | | | | | | | Breast/ | | |
| | | | | | | | | | Ovarian | | |
| 94 | 771920 | F36D4.2 gene product [Caenorhabditis elegans] | gi\|1245686 | 711 | 1562 | 58 | 77 | HAIDT44 | Lung, | | |
| | | >sp\|Q20100\|Q20100 COSMID F36D4. Length = 224 | | | | | | | Pancreas | | |
| 95 | 772790 | cell division inhibitor [Synechocystis sp.] | gnl\|PID\|d1018240 | 145 | 1158 | 35 | 54 | HCEOT95 | Lung, | | |
| | | >pir\|S77404\|S77404 cell division inhibitor - | | | | | | | Breast/ | | |
| | | Synechocystis sp. (PCC 6803) >sp\|P73467\|P73467 | | | | | | | Ovarian | | |
| | | CELL DIVISION INHIBITOR. Length = 339 | | | | | | | | | |
| 96 | 772916 | similar to human ZFY protein. [Homo sapiens] | gnl\|PID\|d1013891 | 3 | 965 | 99 | 99 | HCEIT26 | Lung, | | |
| | | >sp\|Q92610\|Q92610 MYELOBLAST KIAA0211. | | | | | | | Pancreas | | |
| | | Length = 1267 | | | | | | | | | |
| 97 | 773225 | | | 52 | 504 | | | HCLBI78 | Lung, | | |
| | | | | | | | | | Pancreas | | |
| 98 | 773632 | Hrs [Homo sapiens] >gi\|2731383 HGF receptor | gnl\|PID\|d1024245 | 1 | 309 | 98 | 98 | HCEVQ60 | Pancreas, | | |
| | | substrate Hrs [Homo sapiens] >sp\|O14964\|O14964 | | | | | | | Prostate, | | |
| | | HRS, COMPLETE CDS. Length = 777 | | | | | | | Breast/ | | |
| | | | | | | | | | Ovarian | | |
| 99 | 774364 | (AF080561) SYT interacting protein SIP [Homo | gi\|3746787 | 1 | 408 | 100 | 100 | HCHAR77 | Pancreas, | | |
| | | sapiens] >sp\|O75932\|O75932 SYT INTERACTING | | | | | | | Breast/ | | |
| | | PROTEIN SIP. Length = 669 | | | | | | | Ovarian | | |
| 100 | 775355 | | | 1599 | 1781 | | | HDTBY31 | Lung, | | |
| | | | | | | | | | Pancreas | | |
| 101 | 775844 | rfp transforming protein [Homo sapiens] | gi\|337372 | 138 | 1877 | 92 | 92 | HISCU10 | Lung, | | |
| | | >pir\|A28101\|TVHURF ret finger protein - human | | | | | | | Pancreas | | |
| | | >gnl\|PID\|e308255 RFP [Homo sapiens] {SUB 250- | | | | | | | | | |
| | | 513} Length = 513 | | | | | | | | | |
| 102 | 777760 | (AF015040) NUMB protein [Homo sapiens] | gi\|4102705 | 62 | 1372 | 88 | 88 | HMSHK67 | Pancreas, | | |
| | | >sp\|G4102705\|G4102705 NUMB PROTEIN. | | | | | | | Breast/ | | |
| | | >gi\|4050088 (AF109907) S171 [Homo sapiens] | | | | | | | Ovarian | | |
| | | {SUB 79-603} >gi\|887362 ORF; putative [Homo | | | | | | | | | |
| | | sapiens] {SUB 469-603] Length = 603 | | | | | | | | | |
| 103 | 779837 | tazarotene-induced gene 2 [Homo sapiens] | gi\|1848264 | 88 | 567 | 97 | 98 | HSWBV38 | Lung, | | |
| | | >sp\|Q99969\|Q99969 TAZAROTENE-INDUCED | | | | | | | Pancreas | | |
| | | GENE 2. Length = 163 | | | | | | | | | |
| 104 | 780769 | (AF084259) bromodomain-containing protein BP75 | gi\|3493162 | 100 | 762 | 35 | 58 | HULBS08 | Lung, | | |
| | | [Mus musculus] >sp\|O88665\|O88665 | | | | | | | Pancreas | | |
| | | BROMODOMAIN-CONTAINING PROTEIN | | | | | | | | | |
| | | BP75. Length = 651 | | | | | | | | | |
| 105 | 781445 | | | 496 | 1443 | | | HMVAP52 | Pancreas, | | |
| | | | | | | | | | Breast/ | | |
| | | | | | | | | | Ovarian | | |
| 106 | 781531 | lumican [Homo sapiens] Length = 338 | gi\|699577 | 1 | 486 | 100 | 100 | HCHAF71 | Pancreas, | | |
| | | | | | | | | | Breast/ | | |
| | | | | | | | | | Ovarian | | |
| 107 | 783018 | ovary2 [Drosophila melanogaster] | gi\|1208732 | 120 | 674 | 58 | 76 | HTPCZ45 | Pancreas, | | |
| | | >sp\|Q27924\|Q27924 OVARY2. >gi\|1208729 ovary2 | | | | | | | Breast/ | | |
| | | [Drosophila melanogaster] {SUB 386-545} | | | | | | | Ovarian | | |
| | | Length = 545 | | | | | | | | | |
| 108 | 783097 | myogenic repressor I-mf [Homo sapiens] | gi\|1763615 | 413 | 919 | 85 | 85 | HMWGR19 | Lung, | | |
| | | >sp\|Q99750\|Q99750 MYOGENIC REPRESSOR I- | | | | | | | Colon | | |
| | | MF. Length = 246 | | | | | | | | | |
| 109 | 784198 | (AJ005893) JM26 [Homo sapiens] | gnl\|PID\|e1289747 | 80 | 943 | 81 | 81 | HNTNB85 | Lung, | | |
| | | >sp\|O60828\|O60828 JM26 PROTEIN, COMPLETE | | | | | | | Pancreas, | | |
| | | CDS (CLONE LLOXNC01U138D3 (BAYLOR | | | | | | | Breast/ | | |
| | | COLLEGE)). Length = 265 | | | | | | | Ovarian | | |
| 110 | 784868 | WW-domain binding protein I [Mus musculus] | gi\|1777577 | 1 | 969 | 77 | 85 | HNTNQ08 | Lung, | | |
| | | >sp\|P97764\|P97764 WW-DOMAIN BINDING | | | | | | | Pancreas, | | |
| | | PROTEIN 1. Length = 305 | | | | | | | Breast/ | | |
| | | | | | | | | | Ovarian | | |
| 111 | 785428 | translation initiation factor 5 [Homo sapiens] | gi\|1229140 | 308 | 1606 | 87 | 87 | HPMCI14 | Lung, | | |
| | | >sp\|P55010\|IF5_HUMAN EUKARYOTIC | | | | | | | Pancreas, | | |
| | | TRANSLATION INITIATION FACTOR 5 (EIF-5). | | | | | | | Breast/ | | |
| | | Length = 431 | | | | | | | Ovarian | | |
| 112 | 785845 | | | 67 | 1350 | | | HCGBE06 | Lung, | | |
| | | | | | | | | | Colon, | | |
| | | | | | | | | | Breast/ | | |
| | | | | | | | | | Ovarian | | |
| 113 | 785854 | | | 3 | 509 | | | HUSXJ65 | Lung, | | |
| | | | | | | | | | Pancreas | | |
| 114 | 786705 | | | 64 | 180 | | | HBJJB89 | Lung, | | |
| | | | | | | | | | Pancreas, | | |
| | | | | | | | | | Breast/ | | |
| | | | | | | | | | Ovarian | | |
| 115 | 787186 | | | 319 | 975 | | | HUKBB89 | Lung, | | |
| | | | | | | | | | Pancreas | | |
| 116 | 787279 | proteasome subunit z [Homo sapiens] | gn\|PID\|d1007816 | 80 | 856 | 94 | 94 | HKAJZ91 | Lung, | | |
| | | >sp\|Q99436\|Q99436 PROTEASOME SUBUNIT Z. | | | | | | | Breast/ | | |
| | | Length = 277 | | | | | | | Ovarian | | |
| 117 | 789002 | | | 178 | 402 | | | HATBM56 | Lung, | | |
| | | | | | | | | | Pancreas, | | |
| | | | | | | | | | Breast/ | | |
| | | | | | | | | | Ovarian | | |
| 118 | 789008 | 1.8 kb mRNA (AA 1-84) [Homo sapiens] | gi\|33000 | 1354 | 1737 | 100 | 100 | HISCN20 | Lung, | | |
| | | >pir\|S03384\|S03384 hypothetical protein (IGF-II 3′ | | | | | | | Pancreas | | |
| | | region) - human >sp\|P09565\|IG2R_HUMAN | | | | | | | | | |
| | | PUTATIVE INSULIN-LIKE GROWTH FACTOR | | | | | | | | | |
| | | II ASSOCIATED PROTEIN. Length = 84 | | | | | | | | | |
| 119 | 789555 | (AL035247) hypothetical trp-asp repeat protein | gn\|PID\|e1371207 | 124 | 1815 | 42 | 66 | HTTCB23 | Pancreas, | | |
| | | [Schizosaccharomyces pombe] Length = 760 | | | | | | | Breast/ | | |
| | | | | | | | | | Ovarian | | |
| 120 | 789631 | | | 192 | 320 | | | HLICN93 | Lung, | | |
| | | | | | | | | | Pancreas, | | |
| | | | | | | | | | Colon | | |
| 121 | 789779 | | | 1 | 396 | | | HCHMS40 | Colon, | | |
| | | | | | | | | | Breast/ | | |
| | | | | | | | | | Ovarian | | |
| 122 | 790387 | | | 3 | 527 | | | HLMNA32 | Colon, | | |
| | | | | | | | | | Breast/ | | |
| | | | | | | | | | Ovarian | | |
| 123 | 790461 | (AF008445) phospholipid scramblase [Homo | gi\|2282601 | 105 | 1193 | 99 | 99 | HTGAV10 | Lung, | | |
| | | sapiens] >gnl\|P1D\|d1033532 (AB006746) | | | | | | | Pancreas, | | |
| | | hMmTRA1b [Homo sapiens] >gi\|4092081 | | | | | | | Breast/ | | |
| | | (AF098642) phospholipid scramblase; plasma | | | | | | | Ovarian | | |
| | | membrane phospholipid scramblase [Homo sapiens] | | | | | | | | | |
| | | >sp\|O15162\|O15162 PHOSPHOLIPID | | | | | | | | | |
| | | SCRAMBLASE. >sp\|G4 | | | | | | | | | |
| 124 | 790931 | | | 2 | 394 | | | HBCAO30 | Pancreas, | | |
| | | | | | | | | | Breast/ | | |
| | | | | | | | | | Ovarian | | |
| 125 | 791176 | (AB002107) hPer [Homo sapiens] >gi\|2435507 | dbj\| | 3 | 1034 | 90 | 90 | HNFCJ67 | Lung, | | |
| | | (AF022991) Rigui [Homo sapiens] | AB002107_1 | | | | | | Pancreas | | |
| | | >sp\|O15534\|O15534 RIGUI. Length = 1290 | | | | | | | | | |
| 126 | 791983 | | | 637 | 837 | | | HBJLE45 | Lung, | | |
| | | | | | | | | | Pancreas, | | |
| | | | | | | | | | Colon, | | |
| | | | | | | | | | Breast/ | | |
| | | | | | | | | | Ovarian | | |
| 127 | 792539 | (AF020833) eukaryotic translation initiation factor 3 | gi\|2460200 | 94 | 1068 | 94 | 94 | HDPPX89 | Lung, | | |
| | | subunit [Homo sapiens] >sp\|O14801\|O14801 | | | | | | | Pancreas, | | |
| | | EUKARYOTIC TRANSLATION INITIATION | | | | | | | Breast/ | | |
| | | FACTOR 3 SUBUNIT. Length = 320 | | | | | | | Ovarian | | |
| 128 | 792749 | protein arginine N-methyltransferase [Rattus | gi\|1390025 | 34 | 1104 | 95 | 96 | HDQEP64 | Lung, | | |
| | | norvegicus] >sp\|Q63009\|ANM1_RAT PROTEIN | | | | | | | Breast/ | | |
| | | ARGININE N-METHYLTRANSFERASE 1 (EC | | | | | | | Ovarian | | |
| | | 2.1.1.-). Length = 353 | | | | | | | | | |
| 129 | 792961 | (AF036249) polymerase I-transcript release factor; | gi\|2674195 | 778 | 1305 | 85 | 86 | HMEKG25 | Lung, | | |
| | | PTRF [Mus musculus] >sp\|O54724\|O54724 | | | | | | | Breast/ | | |
| | | POLYMERASE I AND TRANSCRIPT RELEASE | | | | | | | Ovarian | | |
| | | FACTOR (POLYMERASE I-TRANSCRIPT | | | | | | | | | |
| | | RELEASE FACTOR). Length = 392 | | | | | | | | | |
| 130 | 793206 | dJ14O9.2 (Melanoma-Associated Antigen MAGE | gnl\|PID\|e1311294 | 889 | 1365 | 99 | 99 | HTWFN71 | Lung, | | |
| | | LIKE) [Homo sapiens] >sp\|O76058\|O76058 | | | | | | | Pancreas | | |
| | | DJ14O9.2 (MELANOMA-ASSOCIATED | | | | | | | | | |
| | | ANTIGEN MAGE LIKE). Length = 606 | | | | | | | | | |
| 131 | 793249 | proliferation associated gene (pag) gene product | gi\|287641 | 3 | 701 | 100 | 100 | HJAAE81 | Lung, | | |
| | | [Homo sapiens] >pir\|A46711\|A46711 proliferation | | | | | | | Pancreas, | | |
| | | associated gene (pag) protein - human Length = 199 | | | | | | | Breast/ | | |
| | | | | | | | | | Ovarian | | |
| 132 | 793626 | alpha mannosidase II isozyme [Homo sapiens] | gnl\|PID\|d1010153 | 119 | 640 | 99 | 99 | HWABS13 | Lung, | | |
| | | >sp\|P49641\|MA2X_HUMAN ALPHA- | | | | | | | Pancreas | | |
| | | MANNOSIDASE IIX (EC 3.2.1.114) | | | | | | | | | |
| | | (MANNOSYL-OLIGOSACCHARIDE 1,3-1,6- | | | | | | | | | |
| | | ALPHA-MANNOSIDASE) (MAN IIX). Length = | | | | | | | | | |
| | | 1139 | | | | | | | | | |
| 133 | 794417 | (AF047470) malate dehydrogenase precursor [Homo | gi\|2906146 | 3 | 1142 | 99 | 99 | HFPBR03 | Lung, | | |
| | | sapiens] >sp\|O43682\|O436S2 MALATE | | | | | | | Pancreas, | | |
| | | DEHYDROGENASE (EC 1.1.1.37) PRECURSOR | | | | | | | Breast/ | | |
| | | (EC 1.1.1.37). Length = 338 | | | | | | | Ovarian | | |
| 134 | 795197 | | | 82 | 888 | | | HDPFT26 | Lung, | | |
| | | | | | | | | | Breast/ | | |
| | | | | | | | | | Ovarian | | |
| 135 | 795251 | GAP SH3 binding protein [Homo sapiens] | gi\|1051170 | 101 | 1531 | 91 | 91 | HE8FJ92 | Pancreas, | | |
| | | >sp\|Q13283\|Q13283 GAP SH3 BINDING | | | | | | | Breast/ | | |
| | | PROTEIN. Length = 466 | | | | | | | Ovarian | | |
| 136 | 795752 | | | 2 | 1018 | | | HWBDR92 | Lung, | | |
| | | | | | | | | | Pancreas | | |
| 137 | 796261 | ubiquitin carrier protein E2 - human >gi\|181916 | pir\|B42856\| | 3 | 851 | 87 | 87 | HCHPQ06 | Colon, | | |
| | | ubiquitin carrier protein [Homo sapiens] {SUB 23- | B42856 | | | | | | Breast/ | | |
| | | 247} Length = 247 | | | | | | | Ovarian | | |
| 138 | 796933 | lumican [Homo sapiens] Length = 338 | gi\|699577 | 49 | 1107 | 94 | 94 | HPMSD56 | Lung, | | |
| | | | | | | | | | Pancreas, | | |
| | | | | | | | | | Prostate, | | |
| | | | | | | | | | Colon, | | |
| | | | | | | | | | Breast/ | | |
| | | | | | | | | | Ovarian | | |
| 139 | 799424 | | | 525 | 1553 | | | HEONK47 | Lung, | | |
| | | | | | | | | | Pancreas, | | |
| | | | | | | | | | Breast/ | | |
| | | | | | | | | | Ovarian | | |
| 140 | 799698 | | | 1 | 426 | | | HCHAM08 | Colon, | | |
| | | | | | | | | | Breast/ | | |
| | | | | | | | | | Ovarian | | |
| 141 | 800351 | DNAJ homolog [Homo sapiens] >gi\|1127833 heat | gi\|1518918 | 282 | 860 | 83 | 84 | HEMFP05 | Pancreas, | | |
| | | shock protein hsp40 homolog [Homo sapiens] | | | | | | | Breast/ | | |
| | | >pir\|G02272\|G02272 heat shock protein hsp40 | | | | | | | Ovarian | | |
| | | homolog - human >sp\|Q13431\|Q13431 HEAT | | | | | | | | | |
| | | SHOCK PROTEIN HSP40 HOMOLOG. Length = | | | | | | | | | |
| | | 178 | | | | | | | | | |
| 142 | 800573 | 26S protease subunit [Sus scrofa] >gi\|3193258 | gn\|PID\|e235521 | 178 | 1383 | 93 | 93 | HCEVS28 | Lung, | | |
| | | (AF069053) proteasome subunit SUG1 [Bos taurus] | | | | | | | Breast/ | | |
| | | >gnl\|PID\|d1012606 proteasomal ATPase (rat SUG1) | | | | | | | Ovarian | | |
| | | [Rattus norvegicus] >gnl\|PID\|d1023806 (AB000491) | | | | | | | | | |
| | | proteasome p45/SUG [Rattus norvegicus] | | | | | | | | | |
| | | >gnl\|PID\|e199326 mSUG1 pr | | | | | | | | | |
| 143 | 805815 | | | 15 | 1055 | | | HCHAP80 | Lung, | | |
| | | | | | | | | | Colon, | | |
| | | | | | | | | | Breast/ | | |
| | | | | | | | | | Ovarian | | |
| 144 | 806445 | | | 711 | 1028 | | | HTELC67 | Lung, | | |
| | | | | | | | | | Pancreas | | |
| 145 | 810309 | (AF098482) transcriptional coactivator p52 [Homo | gi\|4050034 | 226 | 741 | 61 | 75 | HNTDX22 | Lung, | | |
| | | sapiens] >sp\|G4050034\|G4050034 | | | | | | | Pancreas | | |
| | | TRANSCRIPTIONAL COACTIVATOR P52. | | | | | | | | | |
| | | Length = 333 | | | | | | | | | |
| 146 | 811022 | | | 168 | 881 | | | HISEA13 | Lung, | | |
| | | | | | | | | | Pancreas | | |
| 147 | 811023 | | | 13 | 234 | | | HLWAW17 | Lung, | | |
| | | | | | | | | | Pancreas, | | |
| | | | | | | | | | Colon, | | |
| | | | | | | | | | Breast/ | | |
| | | | | | | | | | Ovarian | | |
| 148 | 811143 | cytokine inducible SH2-containing protein [Mus | gnl\|PID\|d1007285 | 3 | 887 | 90 | 92 | HDQPA25 | Lung, | | |
| | | musculus] >pir\|S55551\|S55551 cytokine-inducible | | | | | | | Breast/ | | |
| | | protein CIS - mouse >sp\|Q62225\|Q62225 | | | | | | | Ovarian | | |
| | | CYTOKINE INDUCIBLE SH2-CONTAINING | | | | | | | | | |
| | | PROTEIN (SH2 DOMAIN CONTAINING | | | | | | | | | |
| | | PROTEIN INDUCED BY MULTIPLE | | | | | | | | | |
| | | CYTOKINES, SIC). Length = 257 | | | | | | | | | |
| 149 | 811381 | FIN14 gene product [Mus musculus] | gi\|1353711 | 1338 | 1511 | 86 | 91 | HLYEK93 | Colon, | | |
| | | >sp\|Q61077\|FI14_MOUSE FIBROBLAST | | | | | | | Breast/ | | |
| | | GROWTH FACTOR INDUCIBLE PROTEIN 14 | | | | | | | Ovarian | | |
| | | (FIN14). Length = 61 | | | | | | | | | |
| 150 | 811595 | CIRP [Homo sapiens] >gi\|2924760 (AC004258) | gnl\|PID\|d1011874 | 1 | 609 | 100 | 100 | HDTLA92 | Pancreas, | | |
| | | CIRP [Homo sapiens] >gi\|2541973 (AF021336) | | | | | | | Breast/ | | |
| | | DNA damage-inducible RNA binding protein | | | | | | | Ovarian | | |
| | | [Homo sapiens] >sp\|Q14011\|Q14011 GLYCINE- | | | | | | | | | |
| | | RICH RNA BINDING PROTEIN CIRP. Length = | | | | | | | | | |
| | | 172 | | | | | | | | | |
| 151 | 813000 | Tera [Mus musculus] >sp\|P70361\|P70361 TERA. | gi\|1575505 | 95 | 850 | 84 | 86 | HDPVZ64 | Pancreas, | | |
| | | Length = 277 | | | | | | | Breast/ | | |
| | | | | | | | | | Ovarian | | |
| 152 | 813288 | fau gene product [Homo sapiens] >gi\|31305 fau 1 | gi\|31303 | 1 | 510 | 86 | 86 | HCHMQ63 | Lung, | | |
| | | gene product [Homo sapiens] >pir\|JC1278\|JC1278 | | | | | | | Breast/ | | |
| | | ubiquitin-like protein/ribosomal protein S30, | | | | | | | Ovarian | | |
| | | cytosolic - human Length = 133 | | | | | | | | | |
| 153 | 813431 | DAP-1 [Homo sapiens] >pir\|I37274\|I37274 death- | gi\|434845 | 3 | 470 | 89 | 89 | HWHQS70 | Lung, | | |
| | | associated protein 1 - human | | | | | | | Pancreas | | |
| | | >sp\|P51397\|DAP1_HUMAN DEATH- | | | | | | | | | |
| | | ASSOCIATED PROTEIN 1 (DAP-1). Length = 102 | | | | | | | | | |
| 154 | 813450 | PISSLRE gene product [Homo sapiens] | gi\|556651 | 1 | 651 | 100 | 100 | HCEEJ73 | Lung, | | |
| | | >pir\|S49330\|S49330 serine/threonine kinase (EC | | | | | | | Pancreas | | |
| | | 2.7.1.-) pisslre - human >pir\|I38116\|I38116 gene | | | | | | | | | |
| | | PISSLRE protein - human >sp\|Q15131\|Q15131 | | | | | | | | | |
| | | PISSLRE MRNA. Length = 360 | | | | | | | | | |
| 155 | 813478 | retinoblastoma-binding protein mRbAp48 [Mus | gi\|1016275 | 1 | 1398 | 99 | 100 | HAJBH20 | Lung, | | |
| | | musculus] >pir\|I49366\|I49366 retinoblastoma | | | | | | | Pancreas, | | |
| | | binding protein mRbAp48 - mouse Length = 461 | | | | | | | Breast/ | | |
| | | | | | | | | | Ovarian | | |
| 156 | 813505 | ribosomal protein L23a [Homo sapiens] >gi\|306549 | gi\|404015 | 2 | 496 | 100 | 100 | HDABR53 | Lung, | | |
| | | homology to rat ribosomal protein L23 [Homo | | | | | | | Pancreas | | |
| | | sapiens] {SUB 10-156} Length = 156 | | | | | | | | | |
| 157 | 815552 | (AJ011497) Claudin-9 [Homo sapiens] | gnl\|PID\| | 317 | 898 | 95 | 96 | HUFEH29 | Lung, | | |
| | | >sp\|E1363658\|E1363658 CLAUDIN-9. Length = | e1363658 | | | | | | Colon | | |
| | | 211 | | | | | | | | | |
| 158 | 815606 | Ki-1/57 intracellular antigen [Homo sapiens] | gi\|3403154 | 218 | 1303 | 90 | 95 | HDPRY63 | Lung, | | |
| | | >sp\|O75804\|O75804 KI-1/57 INTRACELLULAR | | | | | | | Pancreas, | | |
| | | ANTIGEN (FRAGMENT). Length = 299 | | | | | | | Breast/ | | |
| | | | | | | | | | Ovarian | | |
| 165 | 825279 | | | 36 | 602 | | | H6EDN61 | Lung, | | |
| | | | | | | | | | Pancreas | | |
| 166 | 825442 | | | 1 | 900 | | | HTODA45 | Colon, | | |
| | | | | | | | | | Breast/ | | |
| | | | | | | | | | Ovarian | | |
| 167 | 825548 | ancient ubiquitous 46 kDa protein AUP46 precursor | gi\|1517822 | 473 | 1504 | 81 | 84 | HLUDB77 | Lung, | | |
| | | [Mus musculus] >sp\|P70295\|P70295 ANCIENT | | | | | | | Breast/ | | |
| | | UBIQUITOUS PROTEIN PRECURSOR (AUP1). | | | | | | | Ovarian | | |
| | | Length = 410 | | | | | | | | | |
| 168 | 825725 | hNop56 [Homo sapiens] | gnl\|PID\|e1188703 | 25 | 723 | 99 | 99 | HMWIV57 | Lung, | | |
| | | >sp\|O00567\|NO56_HUMAN NUCLEOLAR | | | | | | | Pancreas | | |
| | | PROTEIN NOP56. Length = 602 | | | | | | | | | |
| 169 | 826639 | H. sapiens mRNA for rat translocon-associated | gi\|1071681 | 1 | 561 | 100 | 100 | HPTVX93 | Lung, | | |
| | | protein delta homolog [Homo sapiens] | | | | | | | Colon, | | |
| | | >gnl\|PID\|e212192 translocon-associated protein | | | | | | | Breast/ | | |
| | | delta subunit precursor [Homo sapiens] | | | | | | | Ovarian | | |
| | | >gnl\|PID\|e220312 translocon-associated protein | | | | | | | | | |
| | | delta subunit precursor [Homo sapiens] > | | | | | | | | | |
| 170 | 827079 | (AL009171) 62D9.a [Drosophila melanogaster] | gnl\|PID\|e1198294 | 53 | 2176 | 71 | 85 | HDAAD02 | Lung, | | |
| | | >sp\|E1198294\|E1198294 62D9.A. Length = 1305 | | | | | | | Breast/ | | |
| | | | | | | | | | Ovarian | | |
| 171 | 827153 | pancreatitis-associated protein [Homo sapiens] | gi\|482909 | 54 | 602 | 90 | 90 | HLQBS95 | Pancreas, | | |
| | | >gi\|312807 preprotein [Homo sapiens] >bbs\|121222 | | | | | | | Colon, | | |
| | | PAP-H = pancreatitis-associated protein [human, | | | | | | | Breast/ | | |
| | | pancreas, Peptide, 175 aa] [Homo sapiens] | | | | | | | Ovarian | | |
| | | >gnl\|PID\|d1003233 PAP homologous protein [Homo | | | | | | | | | |
| | | sapiens] >pir\|A49616\|A49 | | | | | | | | | |
| 172 | 827351 | | | 1 | 639 | | | HSKJE35 | Colon, | | |
| | | | | | | | | | Breast/ | | |
| | | | | | | | | | Ovarian | | |
| 173 | 827503 | (AC004003) serine/threonine kinase RICK; match to | gi\|3264574 | 255 | 1886 | 98 | 98 | HLAAB36 | Lung, | | |
| | | protein AF027706 (PID:g3123887) and mRNA | | | | | | | Breast/ | | |
| | | AF027706 (NID:g3123886) [Homo sapiens] | | | | | | | Ovarian | | |
| | | >gi\|3290172 (AF064824) CARD-containing ICE | | | | | | | | | |
| | | associated kinase [Homo sapiens] >gi\|3342910 | | | | | | | | | |
| | | (AF078530) receptor interacting prote | | | | | | | | | |
| 174 | 827563 | rhophilin [Mus musculus] >sp\|Q61085\|Q61085 GTP- | gi\|1176422 | 6 | 776 | 81 | 91 | HBGDH11 | Colon, | | |
| | | RHO BINDING PROTEIN 1 (RHOPHILIN). | | | | | | | Breast/ | | |
| | | Length = 643 | | | | | | | Ovarian | | |
| 175 | 827565 | serine protease [Homo sapiens] Length = 492 | gi\|2507613 | 1 | 744 | 55 | 68 | HCHAK72 | Lung, | | |
| | | | | | | | | | Pancreas, | | |
| | | | | | | | | | Colon, | | |
| | | | | | | | | | Breast/ | | |
| | | | | | | | | | Ovarian | | |
| 176 | 827893 | homology with GTP binding protein; putative | gi\|289610 | 165 | 836 | 62 | 75 | HMSOT38 | Lung, | | |
| | | [Caenorhabditis elegans] >pir\|S44605\|S44605 | | | | | | | Pancreas | | |
| | | CO2F5.3 protein - Caenorhabditis elegans Length = | | | | | | | | | |
| | | 573 | | | | | | | | | |
| 177 | 828072 | | | 1147 | 1305 | | | HTECA53 | Lung, | | |
| | | | | | | | | | Pancreas, | | |
| | | | | | | | | | Breast/ | | |
| | | | | | | | | | Ovarian | | |
| 178 | 828228 | | | 1105 | 1314 | | | HWLAH78 | Prostate, | | |
| | | | | | | | | | Colon | | |
| 179 | 828241 | cathepsin O [Homo sapiens] >pir\|A55090\|A55090 | gi\|574804 | 2 | 1012 | 93 | 93 | HWBBP30 | Lung, | | |
| | | cathepsin O (EC 3.4.-.-) precursor - human | | | | | | | Pancreas, | | |
| | | >sp\|P43234\|CATO_HUMAN CATHEPSIN O | | | | | | | Prostate | | |
| | | PRECURSOR (EC 3,4.22.-). Length = 321 | | | | | | | | | |
| 180 | 828287 | histone (H2A.Z) [Bos taurus] >gi\|410 histone H2A.Z | gi\|163150 | 171 | 572 | 100 | 100 | HUSIS02 | Lung, | | |
| | | (AA 1-127) [Bos taurus] >gi\|184060 histone | | | | | | | Pancreas, | | |
| | | (H2A.Z) [Homo sapiens] >gi\|31975 histone H2A.Z | | | | | | | Prostate, | | |
| | | (AA 1-127) [Homo sapiens] >gi\|3649600 histone | | | | | | | Breast/ | | |
| | | [Homo sapiens] >gi\|204599 histone (H2A.Z) [Rattus | | | | | | | Ovarian | | |
| | | norvegicus] >gi\|57 | | | | | | | | | |
| 181 | 828364 | | | 663 | 1340 | | | HWHGT17 | Pancreas, | | |
| | | | | | | | | | Breast/ | | |
| | | | | | | | | | Ovarian | | |
| 182 | 828371 | complement component C1s [Homo sapiens] | gi\|179646 | 4 | 2283 | 97 | 97 | HLQCQ12 | Lung, | | |
| | | >gi\|179648 complement subcomponent C1s | | | | | | | Pancreas, | | |
| | | precursor [Homo sapiens] >gi\|763110 complement | | | | | | | Colon, | | |
| | | protein Cis precursor [Homo sapiens] | | | | | | | Breast/ | | |
| | | >pir\|A40496\|C1HUS complement subcomponent | | | | | | | Ovarian | | |
| | | Cis (EC 3.4.21.42) precursor - human | | | | | | | | | |
| | | >sp\|P09871\|C1 | | | | | | | | | |
| 183 | 828403 | DNA-binding protein [Homo sapiens] | gi\|184390 | 1 | 648 | 98 | 98 | HDTHL82 | Lung, | | |
| | | >pir\|A44478\|A44478 probable cell growth or | | | | | | | Pancreas, | | |
| | | differentiation regulator (alternatively spliced type I | | | | | | | Colon | | |
| | | transcript) - human >sp\|Q02833\|Q02833 PUTATIVE | | | | | | | | | |
| | | TRANSCRIPTIONAL REGULATORY PROTEIN | | | | | | | | | |
| | | HRC1. Length = 373 | | | | | | | | | |
| 184 | 828501 | (AF056302) eIF-2alpha kinase [Drosophila | gi\|3046551 | 1 | 1812 | 36 | 58 | HBMDG73 | Lung, | | |
| | | melanogaster] >sp\|O61651\|O61651 EIF-2ALPHA | | | | | | | Colon, | | |
| | | KINASE. Length = 1589 | | | | | | | Ovarian | | Breast/ |
| 185 | 828520 | (AJ010840) ATP-dependent RNA helicase [Homo | gnl\|PID\| | 445 | 1821 | 91 | 91 | HRGBN47 | Prostate, | | |
| | | sapiens] >sp\|E1321519\|E1321519 ATP- | e1321519 | | | | | | Breast/ | | |
| | | DEPENDENT RNA HELICASE (FRAGMENT). | | | | | | | Ovarian | | |
| | | Length = 420 | | | | | | | | | |
| 186 | 828527 | | | 723 | 926 | | | HSKGQ05 | Lung, | | |
| | | | | | | | | | Pancreas, | | |
| | | | | | | | | | Prostate, | | |
| | | | | | | | | | Breast/ | | |
| | | | | | | | | | Ovarian | | |
| 187 | 828538 | | | 332 | 976 | | | HPWDF55 | Lung, | | |
| | | | | | | | | | Prostate, | | |
| | | | | | | | | | Breast/ | | |
| | | | | | | | | | Ovarian | | |
| 188 | 828541 | pre-pump-1 proteinase (AA - 17 to 250) [Homo | gi\|35799 | 43 | 933 | 100 | 100 | HRACJ32 | Pancreas, | | |
| | | sapiens] >gi\|35803 PUMP [Homo sapiens] | | | | | | | Prostate, | | |
| | | >pir\|B28816\|KCHUM matrilysin (EC 3.4.24.23) | | | | | | | Colon | | |
| | | precursor - human >sp\|P09237\|COG7_HUMAN | | | | | | | | | |
| | | MATRILYSIN PRECURSOR (EC 3.4.24.23) | | | | | | | | | |
| | | (PUMP-1 PROTEASE) (UTERINE | | | | | | | | | |
| | | METALLOPROTEINASE) (MATRI | | | | | | | | | |
| 189 | 828549 | thrombospondin 2 [Homo sapiens] | gi\|307506 | 26 | 1738 | 94 | 94 | HFIAL22 | Pancreas, | | |
| | | >pir\|A47379\|TSHUP2 thrombospondin 2 precursor - | | | | | | | Colon | | |
| | | human Length = 1172 | | | | | | | | | |
| 190 | 828562 | | | 1 | 342 | | | HPWBR24 | Pancreas, | | |
| | | | | | | | | | Prostate | | |
| 191 | 828576 | | | 3 | 731 | | | HPTVU91 | Pancreas, | | |
| | | | | | | | | | Prostate, | | |
| | | | | | | | | | Colon | | |
| 192 | 828602 | | | 1050 | 1568 | | | HPRAT58 | Lung, | | |
| | | | | | | | | | Prostate | | |
| 193 | 828628 | tumor-associated antigen [Homo sapiens] | gi\|180926 | 307 | 1029 | 94 | 94 | HPRCM33 | Pancreas, | | |
| | | >pir\|A36056\|A36056 tumor-associated antigen CO- | | | | | | | Prostate, | | |
| | | 029 - human >sp\|P19075\|CO02_HUMAN TUMOR- | | | | | | | Colon | | |
| | | ASSOCIATED ANTIGEN CO-029. Length = 237 | | | | | | | | | |
| 194 | 828667 | cytochrome c-1 [Homo sapiens] | gi\|181240 | 2 | 1006 | 85 | 85 | HKAOB02 | Pancreas, | | |
| | | >sp\|P08574\|CY1_HUMAN CYTOCHROME C1, | | | | | | | Breast/ | | |
| | | HEME PROTEIN PRECURSOR. >gi\|181238 | | | | | | | Ovarian | | |
| | | cytochrome c1 [Homo sapiens] {SUB 99-325} | | | | | | | | | |
| | | Length = 325 | | | | | | | | | |
| 195 | 828684 | p55CDC [Homo sapiens] >pir\|A56021\|A56021 | gi\|468032 | 41 | 1573 | 92 | 92 | HPJAE35 | Pancreas, | | |
| | | probable cell division control protein p55CDC - | | | | | | | Prostate | | |
| | | human >sp\|Q12834\|Q12834 P55CDC. Length = 499 | | | | | | | | | |
| 196 | 828727 | (AF044954) NADH:ubiquinone oxidoreductase | gi\|4164442 | 3 | 629 | 93 | 93 | HMCBB12 | Lung, | | |
| | | PDSW subunit [Homo sapiens] >gi\|4165091 | | | | | | | Prostate, | | |
| | | (AF088991) NADH:ubiquinone oxidoreductase | | | | | | | Breast/ | | |
| | | PDSW subunit [Homo sapiens] Length = 172 | | | | | | | Ovarian | | |
| 197 | 828734 | homologue of Drosophila Fat protein [Homo | gi\|1107687 | 1 | 657 | 99 | 99 | HSRAB84 | Pancreas, | | |
| | | sapiens] >sp\|Q14517\|Q14517 CADHERIN- | | | | | | | Colon, | | |
| | | RELATED TUMOR SUPPRESSOR HOMOLOG | | | | | | | Breast/ | | |
| | | PRECURSOR (FAT PROTEIN HOMOLOG). | | | | | | | Ovarian | | |
| | | >gnl\|PID\|d1022418 cadherin [Homo sapiens] {SUB | | | | | | | | | |
| | | 993-1132) Length = 4590 | | | | | | | | | |
| 198 | 828750 | (AF035940) similar to mago nashi [Homo sapiens] | gi\|2909830 | 13 | 546 | 100 | 100 | HPIAC11 | Pancreas, | | |
| | | >gi\|2330011 (AF007862) mm-Mago [Mus | | | | | | | Prostate, | | |
| | | musculus] >gi\|2909828 (AF035939) similar to mago | | | | | | | Breast/ | | |
| | | nashi [Mus musculus] >sp\|O35169\|O35169 MM- | | | | | | | Ovarian | | |
| | | MAGO. >sp\|G2909830\|G2909830 MAGOH. | | | | | | | | | |
| | | >sp\|P50606\|MGN_HUMAN MAGO NASHI | | | | | | | | | |
| | | PROTEIN HOMOL | | | | | | | | | |
| 199 | 828842 | (AB007191) AMY-1 [Homo sapiens] | gnl\|PID\|d1023271 | 1 | 363 | 98 | 100 | HOUGA12 | Pancreas, | | |
| | | >gnl\|PID\|d1009980 c-myc binding protein [Homo | | | | | | | Prostate, | | |
| | | sapiens] >sp\|Q99417\|Q99417 C-MYC BINDING | | | | | | | Breast/ | | |
| | | PROTEIN. Length = 103 | | | | | | | Ovarian | | |
| 200 | 828843 | p48 [Homo sapiens] >sp\|P50502\|HIP_HUMAN | gi\|904032 | 3 | 761 | 99 | 100 | HOVBK85 | Lung, | | |
| | | HSC70-INTERACTING PROTEIN | | | | | | | Pancreas, | | |
| | | (PROGESTERONE RECEPTOR-ASSOCIATED | | | | | | | Prostate | | |
| | | P48 PROTEIN). >gi\|1857033 SCN6 gene product | | | | | | | | | |
| | | [Homo sapiens] {SUB 99-369) Length = 369 | | | | | | | | | |
| 201 | 828851 | (AF054284) spliceosomal protein SAP 155 [Homo | gi\|4033735 | 1 | 1029 | 98 | 98 | HOSGA73 | Pancreas, | | |
| | | sapiens] >sp\|G4033735\|G4033735 | | | | | | | Prostate | | |
| | | SPLICEOSOMAL PROTEIN SAP 155. >gi\|3387899 | | | | | | | | | |
| | | (AF070540) putative nuclear protein [Homo | | | | | | | | | |
| | | sapiens ] {SUB 1011-1304} Length = 1304 | | | | | | | | | |
| 202 | 828856 | thymidine kinase (EC 2.7.1.21) [Homo sapiens] | gi\|339709 | 1 | 804 | 99 | 100 | HOHEN75 | Prostate, | | |
| | | >gi\|339719 thymidine kinase [Homo sapiens] | | | | | | | Breast/Ovarian | | |
| | | >pir\|A27318\|KIHUT thymidine kinase (EC | | | | | | | | | |
| | | 2.7.1.21), cytosolic - human | | | | | | | | | |
| | | >sp\|P04183\|KITH_HUMAN THYMIDINE | | | | | | | | | |
| | | KINASE, CYTOSOLIC (EC 2.7,1.21). >gi\|339713 | | | | | | | | | |
| | | thymidine kinase [Homo | | | | | | | | | |
| 203 | 828862 | tyrosine kinase receptor [Homo sapiens] | gi\|292870 | 1 | 417 | 98 | 98 | HOHBI90 | Prostate, | | |
| | | >pir\|B41527\|B41527 transforming protein (axl(−)) - | | | | | | | Breast/ | | |
| | | human Length = 885 | | | | | | | Ovarian | | |
| 204 | 828870 | TRAM protein [Homo sapiens] >pir\|S30034\|S30034 | gi\|37265 | 32 | 1279 | 94 | 94 | HOEKU65 | Lung, | | |
| | | translocating chain-associating membrane protein - | | | | | | | Pancreas, | | |
| | | human >sp\|Q15629\|Q15629 TRAM PROTEIN. | | | | | | | Colon | | |
| | | Length = 374 | | | | | | | | | |
| 205 | 828873 | precursor polypeptide (AA - 31 to 1139) [Homo | gi\|37465 | 1 | 1398 | 100 | 100 | H0HCJ26 | Lung, | | |
| | | sapiens] >gi\|538354 thrombospondin [Homo | | | | | | | Pancreas, | | |
| | | sapiens] {SUB 1-397} >gi\|339669 thrombospondin | | | | | | | Prostate, | | |
| | | [Homo sapiens] {SUB 1028-1170} >gi\|532689 | | | | | | | Colon, | | |
| | | thrombospondin-1p180 [Homo sapiens] {SUB 364- | | | | | | | Breast/ | | |
| | | 422} Length = 1170 | | | | | | | Ovarian | | |
| 206 | 828892 | keratin [Homo sapiens] >sp\|Q14533\|Q14533 | gnl\|PID\|e321549 | 3 | 653 | 90 | 91 | HOGAA83 | Lung, | | |
| | | KERATIN (HAIR TYPE II BASIC KERATIN) | | | | | | | Prostate, | | |
| | | (KERATIN LIKE). >gnl\|PID\|e118093 hair type II | | | | | | | Breast/ | | |
| | | basic keratin [Homo sapiens] {SUB 81-505} | | | | | | | Ovarian | | |
| | | >gi\|951272 keratin like [Homo sapiens] {SUB 249- | | | | | | | | | |
| | | 505} >bbs\|161491 type II hair keratin {cl | | | | | | | | | |
| 207 | 828893 | ESX [Homo sapiens] >gi\|1841523 ESE-1b [Homo | gi\|1754538 | 36 | 1253 | 86 | 86 | HOGAS09 | Pancreas, | | |
| | | sapiens] >gi\|2338756 (AF017307) Ets-related | | | | | | | Prostate, | | |
| | | transcription factor [Homo sapiens] >gi\|2384740 | | | | | | | Colon, | | |
| | | (AF016295) Ets transcription factor [Homo sapiens] | | | | | | | Breast/ | | |
| | | >gi\|2459797 epthelial-specific ets protein [Homo | | | | | | | Ovarian | | |
| | | sapiens] >sp\|P78545 | | | | | | | | | |
| 208 | 828897 | prostasin [Homo sapiens] >gi\|862305 prostasin | gi\|1143194 | 59 | 811 | 92 | 92 | HBCAY53 | Pancreas, | | |
| | | [Homo sapiens] >pir\|A57014\|A57014 prostasin (EC | | | | | | | Colon, | | |
| | | 3.4.21.-) precursor - human >sp\|G565130\|G565130 | | | | | | | Breast/ | | |
| | | PROSTASIN = SERINE PROTEINASE {N- | | | | | | | Ovarian | | |
| | | TERMINAL}. {SUB 45-64} Length = 343 | | | | | | | | | |
| 209 | 828910 | light chain 3 subunit of microtubule-associated | gi\|455109 | 28 | 540 | 96 | 98 | HOHDY41 | Prostate, | | |
| | | proteins 1A and 1B [Rattus norvegicus] | | | | | | | Colon | | |
| | | >pir\|A53624\|A53624 microtubule-associated protein | | | | | | | | | |
| | | 1 light chain 3 - rat >sp\|Q62625\|MPL3_RAT | | | | | | | | | |
| | | MICROTUBULE-ASSOCIATED PROTEINS | | | | | | | | | |
| | | 1A/1B LIGHT CHAIN 3 (MAP1A/MAP1B LC3). | | | | | | | | | |
| | | {SUB | | | | | | | | | |
| 210 | 828927 | cytochrome c oxidase subunit Va [Homo sapiens] | gi\|695360 | 1 | 567 | 99 | 99 | HHFJM88 | Lung, | | |
| | | >pir\|JT0342\|OTHU5A cytochrome-c oxidase (EC | | | | | | | Breast/ | | |
| | | 1.9.3.1) chain Va precursor - human | | | | | | | Ovarian | | |
| | | >sp\|P20674\|COXA_HUMAN CYTOCHROME C | | | | | | | | | |
| | | OXIDASE POLYPEPTIDE VA PRECURSOR (EC | | | | | | | | | |
| | | 1.9.3.1). >gi\|3859864 (AF067635) cytochrome c | | | | | | | | | |
| | | oxidase su | | | | | | | | | |
| 211 | 828932 | 80K-H protein [Homo sapiens] >gi\|1293640 protein | gi\|182855 | 82 | 1026 | 83 | 83 | HNTAC57 | Lung, | | |
| | | kinase C substrate 80K-H [Homo sapiens] | | | | | | | Pancreas, | | |
| | | >pir\|A32469\|A32469 80K protein H precursor - | | | | | | | Prostate, | | |
| | | human >sp\|P14314\|G19P_HUMAN PROTEIN | | | | | | | Breast/ | | |
| | | KINASE C SUBSTRATE, 80 KD PROTEIN, | | | | | | | Ovarian | | |
| | | HEAVY CHAIN (PKCSH) (80K-H PROTEIN). | | | | | | | | | |
| | | Length = 527 | | | | | | | | | |
| 212 | 828933 | Csa-19 [Homo sapiens] Length = 217 | gi\|531171 | 439 | 852 | 97 | 98 | HEMCA07 | Lung, | | |
| | | | | | | | | | Pancreas, | | |
| | | | | | | | | | Breast/ | | |
| | | | | | | | | | Ovarian | | |
| 213 | 828941 | ORF YJL115w [Saccharomyces cerevisiae] | gi\|1008304 | 1 | 729 | 59 | 74 | HMGBJ25 | Lung, | | |
| | | >gi\|171091 ASFi [Saccharomyces cerevisiae] | | | | | | | Pancreas, | | |
| | | >pir\|S30766\|S30766 ASF1 protein - yeast | | | | | | | Colon, | | |
| | | (Saccharomyces cerevisiae) | | | | | | | Breast/ | | |
| | | >sp\|P32447\|ASF1_YEAST ANTI-SILENCING | | | | | | | Ovarian | | |
| | | PROTEIN 1. Length = 279 | | | | | | | | | |
| 214 | 828957 | F31C3.5 [Caenorhabditis elegans] | gnl\|PID\|e1346411 | 3 | 635 | 37 | 68 | HMWHG54 | Prostate, | | |
| | | >sp\|O62193\|O62193 F31C3.5 PROTEIN. Length = | | | | | | | Breast/ | | |
| | | 180 | | | | | | | Ovarian | | |
| 215 | 828963 | house-keeping protein [Mus musculus] | gi\|193871 | 73 | 1293 | 55 | 77 | HMWBH91 | Lung, | | |
| | | >pir\|S27870\|S27870 house-keeping protein - mouse | | | | | | | Prostate, | | |
| | | >sp\|Q61669\|Q61669 HOUSE-KEEPING PROTEIN | | | | | | | Colon, | | |
| | | 1. Length = 396 | | | | | | | Breast/ | | |
| | | | | | | | | | Ovarian | | |
| 216 | 828964 | | | 639 | 905 | | | HMWFZ60 | Pancreas, | | |
| | | | | | | | | | Prostate, | | |
| | | | | | | | | | Colon, | | |
| | | | | | | | | | Breast/ | | |
| | | | | | | | | | Ovarian | | |
| 217 | 828966 | S-adenosylhomocysteine hydrolase [Homo sapiens] | gi\|178279 | 2 | 1372 | 98 | 98 | HMWFV54 | Lung, | | |
| | | >pir\|A43629\|A43629 adenosylhomocysteinase (EC | | | | | | | Pancreas, | | |
| | | 3.3.1.1) - human Length = 432 | | | | | | | Prostate, | | |
| | | | | | | | | | Breast/ | | |
| | | | | | | | | | Ovarian | | |
| 218 | 828967 | putative tRNA synthetase-like protein [Homo | gi\|2102679 | 3 | 1535 | 98 | 98 | HMUBT12 | Pancreas, | | |
| | | sapiens] >gi\|4104935 (AF042347) putative | | | | | | | Prostate, | | |
| | | phenylalanyl-tRNA synthetase alpha-subunit; | | | | | | | Breast/ | | |
| | | PheHA [Homo sapiens] >sp\|E317305\|E317305 | | | | | | | Ovarian | | |
| | | PUTATIVE TRNA SYNTHETASE-LIKE | | | | | | | | | |
| | | PROTEIN. >sp\|G2102679\|G2102679 PUTATIVE | | | | | | | | | |
| | | TRNA SYNTHETASE | | | | | | | | | |
| 219 | 828977 | insulin-like growth factor binding protein 2 [Homo | gi\|179477 | 2 | 685 | 100 | 100 | HMVAW27 | Lung, | | |
| | | sapiens] >bbs\|106618 insulin-like growth factor | | | | | | | Pancreas, | | |
| | | binding protein-2, IGFBP-2 [human, placenta, | | | | | | | Prostate, | | |
| | | Peptide, 328 aa] [Homo sapiens] | | | | | | | Breast/ | | |
| | | >pir\|A41927\|A41927 insulin-like growth factor- | | | | | | | Ovarian | | |
| | | binding protein 2 precursor - hum | | | | | | | | | |
| 220 | 828978 | annexin IV (placental anticoagulant protein II) | gi\|178699 | 213 | 1184 | 100 | 100 | HNTMH78 | Lung, | | |
| | | [Homo sapiens] >gnl\|PID\|d1011889 annexin IV | | | | | | | Pancreas, | | |
| | | (carbohydrtate-binding protein p33/41) [Homo | | | | | | | Prostate | | |
| | | sapiens] >pir\|A42077\|A42077 annexin IV - human | | | | | | | | | |
| | | >sp\|P09525\|ANX4_HUMAN ANNEXIN IV | | | | | | | | | |
| | | (LIPOCORTIN IV) (ENDONEXIN I) (CHROMOB | | | | | | | | | |
| 221 | 828979 | | | 16 | 1080 | | | HMUBO53 | Lung, | | |
| | | | | | | | | | Pancreas, | | |
| | | | | | | | | | Prostate, | | |
| | | | | | | | | | Colon, | | |
| | | | | | | | | | Breast/ | | |
| | | | | | | | | | Ovarian | | |
| 222 | 829001 | | | 1621 | 1959 | | | HMSJR30 | Lung, | | |
| | | | | | | | | | Pancreas, | | |
| | | | | | | | | | Prostate, | | |
| | | | | | | | | | Breast/ | | |
| | | | | | | | | | Ovarian | | |
| 223 | 829003 | plasma gelsolin [Homo sapiens] | gi\|736249 | 635 | 2536 | 99 | 99 | HMSKA53 | Lung, | | |
| | | >pir\|A03011\|FAHUP gelsolin precursor, plasma - | | | | | | | Pancreas | | |
| | | human >sp\|P06396\|GELS_HUMAN GELSOLIN | | | | | | | Prostate | | |
| | | PRECURSOR, PLASMA (ACTIN- | | | | | | | | | |
| | | DEPOLYMERIZING FACTOR) (ADF) (BREVIN) | | | | | | | | | |
| | | (AGEL). >gnl\|PID\|e20565 plasma gelsolin (AA 49- | | | | | | | | | |
| | | 117) [Homo sapiens] {SUB 49-11 | | | | | | | | | |
| 224 | 829016 | (AB006625) The human homolog of a mouse | dbj\| | 409 | 759 | 87 | 87 | HMIAI73 | Prostate, | | |
| | | imprinted gene, Peg3. [Homo sapiens] | AB006625_1 | | | | | | Breast/ | | |
| | | >sp\|P78418\|P78418 K1AA0287 (PEG3) | | | | | | | Ovarian | | |
| | | (FRAGMENT). >gi\|1899244 PEG3 [Homo sapiens] | | | | | | | | | |
| | | {SUB 518-1132} Length 1132 | | | | | | | | | |
| 225 | 829027 | ras-like protein [Homo sapiens] | gi\|190881 | 2 | 577 | 100 | 100 | HMIBE59 | Prostate, | | |
| | | >pir\|D34788\|TVHUC4 transforming protein ras | | | | | | | Colon | | |
| | | (teratocarcinoma clone TC10) - human Length = 213 | | | | | | | | | |
| 226 | 829028 | RnudC gene product [Rattus norvegicus] | gi\|619907 | 31 | 1110 | 95 | 98 | HMGBQ56 | Pancreas, | | |
| | | >pir\|A55897\|A55897 prolactin-induced T cell | | | | | | | Prostate, | | |
| | | protein c15 - rat >sp\|Q63525\|Q63525 C15 MRNA | | | | | | | Breast/ | | |
| | | Length = 332 | | | | | | | Ovarian | | |
| 227 | 829031 | protocadherin X [Mus musculus] | gi\|4099553 | 116 | 637 | 90 | 93 | HMGBI69 | Lung, | | |
| | | >sp\|G4099553\|G4099553 PROTOCADHERIN X. | | | | | | | Pancreas, | | |
| | | Length = 928 | | | | | | | Prostate, | | |
| | | | | | | | | | Breast/ | | |
| | | | | | | | | | Ovarian | | |
| 228 | 829034 | | | 28 | 1362 | | | HMEIY69 | Pancreas, | | |
| | | | | | | | | | Prostate | | |
| 229 | 829036 | Similar to B. subtilis Poly(A) polymerase | gnl\|PID\|e1347205 | 114 | 1151 | 67 | 81 | HMELJ75 | Pancreas, | | |
| | | (SW:PAPS_BACSU) [Caenorhabditis elegans] | | | | | | | Prostate | | |
| | | >sp\|Q93795\|Q93795 F55B12.4 PROTEIN. Length = | | | | | | | | | |
| | | 440 | | | | | | | | | |
| 230 | 829049 | UDP-Gal:GlcNAc galactosyltransferase [Homo | gnl\|PID\|e1283714 | 233 | 1444 | 94 | 94 | HMEFQ33 | Prostate, | | |
| | | sapiens] >sp\|O60910\|O60910 UDP-GAL:GLCNAC | | | | | | | Colon | | |
| | | GALACTOSYLTRANSFERASE. Length = 393 | | | | | | | | | |
| 231 | 829073 | | | 193 | 843 | | | HLYCD85 | Pancreas, | | |
| | | | | | | | | | Prostate | | |
| 232 | 829075 | | | 2 | 484 | | | HMAAD66 | Lung, | | |
| | | | | | | | | | Pancreas, | | |
| | | | | | | | | | Prostate, | | |
| | | | | | | | | | Breast/ | | |
| | | | | | | | | | Ovarian | | |
| 233 | 829076 | | | 3 | 665 | | | HADDC41 | Lung, | | |
| | | | | | | | | | Pancreas, | | |
| | | | | | | | | | Breast/ | | |
| | | | | | | | | | Ovarian | | |
| 234 | 829080 | | | 3 | 500 | | | HMABG80 | Prostate, | | |
| | | | | | | | | | Breast/ | | |
| | | | | | | | | | Ovarian | | |
| 235 | 829087 | small GTP-binding protein [Oryctolagus cuniculus] | gi\|436001 | 157 | 873 | 95 | 97 | HLWBY67 | Pancreas, | | |
| | | >pir\|A48500\|A48500 small GTP-binding protein | | | | | | | Prostate, | | |
| | | Rab25 - rabbit Length = 213 | | | | | | | Breast/ | | |
| | | | | | | | | | Ovarian | | |
| 236 | 829092 | UDP-galactose translocator [Homo sapiens] | gnl\|PID\|d1013353 | 1 | 513 | 85 | 85 | HLWBC74 | Pancreas, | | |
| | | >pir\|JC4903\|JC4903 UDP-galactose transporter, | | | | | | | Prostate | | |
| | | splice form 1 - human Length = 393 | | | | | | | | | |
| 237 | 829095 | | | 3 | 425 | | | HLWBM89 | Lung, | | |
| | | | | | | | | | Pancreas, | | |
| | | | | | | | | | Prostate, | | |
| | | | | | | | | | Colon, | | |
| | | | | | | | | | Breast/ | | |
| | | | | | | | | | Ovarian | | |
| 238 | 829096 | antiquitin = 26 g turgor protein homolog [human, | bbs\|158840 | 552 | 1628 | 97 | 97 | HLWAO28 | Prostate, | | |
| | | kidney, Peptide, 511 aa] [Homo sapiens] | | | | | | | Breast/ | | |
| | | >pir\|A54676\|A54676 antiquitin - human | | | | | | | Ovarian | | |
| | | >sp\|P49419\|DHAX_HUMAN ANTIQUITIN (EC | | | | | | | | | |
| | | 1.2.1.-). Length = 511 | | | | | | | | | |
| 239 | 829118 | nuclear autoantigen fo 14 kDa [Homo sapiens] | gnl\|PID\|e322419 | 2 | 415 | 99 | 99 | HLSDA35 | Lung, | | |
| | | >sp\|O43805\|O43805 NUCLEAR AUTOANTIGEN | | | | | | | Prostate | | |
| | | FO 14 KDA. Length = 119 | | | | | | | | | |
| 240 | 829152 | unknown protein precursor [Homo sapiens] | gnl\|PID\|d1003846 | 215 | 1231 | 95 | 95 | HLICU82 | Lung, | | |
| | | >pir\|JNO596IJNOS96 fibrinogen-related protein | | | | | | | Pancreas, | | |
| | | HFREP-1 precursor - human >sp\|Q08830\|Q08830 | | | | | | | Prostate | | |
| | | FIBRINOGEN-LIKE PROTEIN 1 PRECURSOR. | | | | | | | | | |
| | | Length = 312 | | | | | | | | | |
| 241 | 829160 | ubiquitin-conjugating enzyme UbcH6 [Homo | gi\|1064914 | 2 | 769 | 83 | 83 | HLFBF56 | Lung, | | |
| | | sapiens] Length = 193 | | | | | | | Pancreas, | | |
| | | | | | | | | | Prostate, | | |
| | | | | | | | | | Colon | | |
| 242 | 829163 | | | 403 | 930 | | | HSPBG80 | Lung, | | |
| | | | | | | | | | Pancreas, | | |
| | | | | | | | | | Breast/ | | |
| | | | | | | | | | Ovarian | | |
| 243 | 829176 | C4b-binding protein alpha chain [Homo sapiens] | gi\|190500 | 3 | 662 | 100 | 100 | HLQBR92 | Lung, | | |
| | | >gi\|190502 C4b-binding protein alpha chain [Homo | Pancreas | | | | | | | | |
| | | sapiens] >pir\|A33568\|NBHUC4 C4b-binding protein | | | | | | | | | |
| | | alpha chain precursor - human | | | | | | | | | |
| | | >sp\|P04003\|C4BP_HUMAN C4B-BINDING | | | | | | | | | |
| | | PROTEIN ALPHA CHAIN PRECURSOR | | | | | | | | | |
| | | (PROLINE-RICH PRO | | | | | | | | | |
| 244 | 829204 | | | 515 | 913 | | | HL1SB22 | Prostate, | | |
| | | | | | | | | | Breast/ | | |
| | | | | | | | | | Ovarian | | |
| 245 | 829207 | | | 111 | 977 | | | HL1SA66 | Prostate, | | |
| | | | | | | | | | Breast/ | | |
| | | | | | | | | | Ovarian | | |
| 246 | 829228 | | | 1 | 2508 | | | HKGBQ77 | Lung, | | |
| | | | | | | | | | Prostate, | | |
| | | | | | | | | | Colon | | |
| 247 | 829252 | | | 96 | 1322 | | | HKAPI21 | Pancreas, | | |
| | | | | | | | | | Prostate | | |
| 248 | 829254 | | | 1 | 483 | | | HKFBI96 | Lung, | | |
| | | | | | | | | | Pancreas, | | |
| | | | | | | | | | Prostate, | | |
| | | | | | | | | | Breast/ | | |
| | | | | | | | | | Ovarian | | |
| 249 | 829269 | | | 121 | 474 | | | HKAEE96 | Lung, | | |
| | | | | | | | | | Pancreas, | | |
| | | | | | | | | | Prostate, | | |
| | | | | | | | | | Colon, | | |
| | | | | | | | | | Breast/ | | |
| | | | | | | | | | Ovarian | | |
| 250 | 829277 | | | 3 | 596 | | | HJPCG91 | Lung, | | |
| | | | | | | | | | Prostate | | |
| 251 | 829290 | | | 100 | 207 | | | HJBDL52 | Lung, | | |
| | | | | | | | | | Pancreas, | | |
| | | | | | | | | | Prostate, | | |
| | | | | | | | | | Breast/ | | |
| | | | | | | | | | Ovarian | | |
| 252 | 829294 | | | 3 | 1847 | | | HISDU47 | Pancreas, | | |
| | | | | | | | | | Prostate | | |
| 253 | 829299 | | | 3 | 794 | | | HISEC32 | Lung, | | |
| | | | | | | | | | Pancreas, | | |
| | | | | | | | | | Prostate | | |
| 254 | 829308 | dJ14O9.2 (Melanoma-Associated Antigen MAGE | gnl\|PID\|e1311294 | 207 | 938 | 47 | 70 | HIBCN93 | Lung, | | |
| | | LIKE) [Homo sapiens] >sp\|O76058\|O76058 | | | | | | | Pancreas, | | |
| | | DJ1409.2 (MELANOMA-ASSOCIATED | | | | | | | Prostate, | | |
| | | ANTIGEN MAGE LIKE). Length = 606 | | | | | | | Colon, | | |
| | | | | | | | | | Breast/ | | |
| | | | | | | | | | Ovarian | | |
| 255 | 829349 | ribosomal protein S15a [Rattus norvegicus] | gi\|495273 | 152 | 547 | 100 | 100 | HICAF44 | Lung, | | |
| | | >pir\|JC2234\|JC2234 ribosomal protein S15a - rat | | | | | | | Pancreas, | | |
| | | Length = 130 | | | | | | | Prostate, | | |
| | | | | | | | | | Breast/ | | |
| | | | | | | | | | Ovarian | | |
| 256 | 829354 | RAD4 gene product [Saccharomyces cerevisiae] | gi\|4271 | 1 | 1113 | 44 | 65 | HAJBD51 | Lung, | | |
| | | Length = 730 | | | | | | | Pancreas, | | |
| | | | | | | | | | Breast/ | | |
| | | | | | | | | | Ovarian | | |
| 257 | 829388 | DNase protein [Homo sapiens] >gi\|1620214 XIB | gi\|929628 | 319 | 1281 | 94 | 94 | HUVCJ22 | Lung, | | |
| | | [Homo sapiens] >pir\|JC4633\|JC4633 DNase I-like | | | | | | | Pancreas, | | |
| | | endonuclease (EC 3.1.-.-) - human | | | | | | | Colon, | | |
| | | >sp\|P49184\|DRNL_HUMAN MUSCLE-SPECIFIC | | | | | | | Breast/ | | |
| | | DNASE I-LIKE PRECURSOR (EC 3.1.21.-) | | | | | | | Ovarian | | |
| | | (DNASE X) (XIB). Length = 302 | | | | | | | | | |
| 258 | 829540 | | | 258 | 437 | | | HAPOU28 | Lung, | | |
| | | | | | | | | | Pancreas, | | |
| | | | | | | | | | Colon, | | |
| | | | | | | | | | Breast/ | | |
| | | | | | | | | | Ovarian | | |
| 259 | 829626 | mannosyl-oligosaccharide 1,2-alpha-mannosidase | pir\|B54408\| | 3 | 764 | 75 | 88 | HCEES14 | Lung, | | |
| | | (EC 3.2.1.113) - rabbit (fragment) >gi\|474282 | B54408 | | | | | | Pancreas, | | |
| | | mannosyl-oligosaccharide alpha-1,2-mannosidase | | | | | | | Colon, | | |
| | | [Oryctolagus cuniculus] {SUB 12-480} Length = | Breast/ | | | | | | | | |
| | | 480 | | | | | | | Ovarian | | |
| 260 | 829730 | underexpressed in thyroid tissue after TSH | gnl\|PID\|e252512 | 455 | 1153 | 62 | 75 | HAJBK53 | Pancreas, | | |
| | | stimulation [Canis familiaris] >sp\|Q28283\|Q28283 | | | | | | | Breast/ | | |
| | | C5FW PROTEIN. Length = 343 | | | | | | | Ovarian | | |
| 261 | 829892 | (AF053651) cellular apoptosis susceptibility protein | gi\|3598795 | 64 | 1053 | 85 | 85 | HAMFJ43 | Lung, | | |
| | | [Homo sapiens] >sp\|O75432\|O75432 CELLULAR | | | | | | | Prostate | | |
| | | APOPTOSIS SUSCEPTIBILITY PROTEIN. | | | | | | | | | |
| | | Length = 971 | | | | | | | | | |
| 262 | 829933 | (AF035606) calcium binding protein [Homo | gi\|3342794 | 1 | 540 | 86 | 86 | HAICT76 | Pancreas, | | |
| | | sapiens ] >sp\|O7534O\|O75340 CALCIUM | | | | | | | Prostate | | |
| | | BINDING PROTEIN. Length = 191 | | | | | | | | | |
| 263 | 829938 | (AF067855) geminin [Homo sapiens] | gi\|3249005 | 230 | 952 | 93 | 93 | HAIBS55 | Pancreas, | | |
| | | >sp\|O75496\|O75496 GEMININ. Length = 209 | | | | | | | Prostate | | |
| 264 | 829969 | | | 551 | 814 | | | HACCB64 | Lung, | | |
| | | | | | | | | | Pancreas, | | |
| | | | | | | | | | Prostate, | | |
| | | | | | | | | | Breast/ | | |
| | | | | | | | | | Ovarian | | |
| 265 | 829982 | (AF020352) NADH:ubiquinone oxidoreductase 15 | gi\|2655055 | 28 | 399 | 100 | 100 | HABGE25 | Prostate, | | |
| | | kDa IP subunit [Homo sapiens] >gi\|2911482 | | | | | | | Breast/ | | |
| | | (AF047434) NADH-ubiquinone oxidoreductase | | | | | | | Ovarian | | |
| | | 15 kDa subunit; C1-15 protein [Homo sapiens] | | | | | | | | | |
| | | >sp\|O43920\|NIPM_HUMAN NADH- | | | | | | | | | |
| | | UBIQUINONE OXIDOREDUCTASE 15 KD | | | | | | | | | |
| | | SUBUNIT (EC 1.6.5.3) (E | | | | | | | | | |
| 266 | 830007 | catechol-O-methyltransferase [Homo sapiens] | gi\|180920 | 110 | 1006 | 99 | 99 | H6EDW66 | Lung, | | |
| | | >gi\|403304 catechol O-methyltransferase [Homo | | | | | | | Prostate, | | |
| | | sapiens] >pir\|S37406\|A38459 catechol O- | | | | | | | Breast/ | | |
| | | methyltransferase (EC 2.1.1.6) - human | | | | | | | Ovarian | | |
| | | >sp\|P21964\|COMT_HUMAN CATECHOL O- | | | | | | | | | |
| | | METHYLTRANSFERASE, MEMBRANE-BOUND | | | | | | | | | |
| | | FORM (EC 2.1.1.6) (M | | | | | | | | | |
| 267 | 830019 | (AF030249) putative dienoyl-CoA isomerase [Homo | gi\|2623168 | 77 | 976 | 94 | 96 | H2MAC92 | Prostate, | | |
| | | sapiens] >gi\|564065 peroxisomal enoyl-CoA | | | | | | | Breast/ | | |
| | | hydratase-like protein [Homo sapiens] | | | | | | | Ovarian | | |
| | | >pir\|I38882\|I38882 peroxisomal enoyl-CoA | | | | | | | | | |
| | | hydratase-like protein - human | | | | | | | | | |
| | | >sp\|Q13011\|ECH1_HUMAN PROBABLE | | | | | | | | | |
| | | PEROXISOMAL ENOYL-COA HY | | | | | | | | | |
| 268 | 830073 | | | 1 | 690 | | | HBWBK27 | Lung, | | |
| | | | | | | | | | Pancreas, | | |
| | | | | | | | | | Breast/ | | |
| | | | | | | | | | Ovarian | | |
| 269 | 830130 | | | 1 | 177 | | | H2LAD55 | Lung, | | |
| | | | | | | | | | Prostate, | | |
| | | | | | | | | | Breast/ | | |
| | | | | | | | | | Ovarian | | |
| 270 | 830134 | | | 16 | 1290 | | | H2CBP53 | Lung, | | |
| | | | | | | | | | Pancreas, | | |
| | | | | | | | | | Prostate, | | |
| | | | | | | | | | Colon, | | |
| | | | | | | | | | Breast/ | | |
| | | | | | | | | | Ovarian | | |
| 271 | 830135 | neutrophil gelatinase associated lipocalin [Homo | gi\|929657 | 2 | 763 | 100 | 100 | H2MAC06 | Pancreas, | | |
| | | sapiens] >sp\|P80188\|NGAL_HUMAN | | | | | | | Prostate, | | |
| | | NEUTROPHIL GELATINASE-ASSOCIATED | | | | | | | Breast/ | | |
| | | LIPOCALIN PRECURSOR (NGAL) (P25) (25 KD | | | | | | | Ovarian | | |
| | | ALPHA-2-MICROGLOBULIN-RELATED | | | | | | | | | |
| | | SUBUNIT OF MMP-9) (LIPOCALIN-2) | | | | | | | | | |
| | | (ONCOGENE 24P3). Length = 198 | | | | | | | | | |
| 272 | 830148 | snRNP polypeptide B [Homo sapiens] | gi\|190247 | 96 | 839 | 79 | 79 | HAICK77 | Lung, | | |
| | | >sp\|Q15182\|Q15182 SNRNP POLYPEPTIDE B. | | | | | | | Prostate, | | |
| | | Length = 285 | | | | | | | Breast/ | | |
| | | | | | | | | | Ovarian | | |
| 273 | 830149 | threonyl-tRNA synthetase [Homo sapiens] | gi\|1464742 | 3 | 2333 | 95 | 95 | H2CBC04 | Lung, | | |
| | | >pir\|A38867\|YSHUT threonine-tRNA ligase (EC | | | | | | | Pancreas, | | |
| | | 6.1.1.3) - human Length = 712 | | | | | | | Prostate | | |
| 274 | 830154 | spectrin SH3 domain binding protein 1 [Homo | gi\|3165429 | 2 | 1081 | 100 | 100 | HYAAC49 | Lung, | | |
| | | sapiens] >sp\|O76049\|O76049 SPECTRIN SH3 | | | | | | | Pancreas | | |
| | | DOMAIN BINDING PROTEIN 1. Length = 508 | | | | | | | | | |
| 275 | 830183 | | | 92 | 358 | | | HWLQF08 | Pancreas, | | |
| | | | | | | | | | Breast/ | | |
| | | | | | | | | | Ovarian | | |
| 276 | 830194 | heat shock protein 84 - mouse >pir\|B34461\|B34461 | pir\|A35569\| | 3 | 1043 | 100 | 100 | HLDCP20 | Lung, | | |
| | | heat shock protein 90 beta - rabbit (fragment) {SUB | HHMS84 | | | | | | Pancreas, | | |
| | | 1-251 >sp\|P30947\|HS9B_RABIT HEAT SHOCK | | | | | | | Breast/ | | |
| | | PROTEIN HSP 90-BETA (HSP 84) (FRAGMENT). | | | | | | | Ovarian | | |
| | | {SUB 2-25} >pir\|513268\|513268 heat shock protein, | | | | | | | | | |
| | | 90K - bovine (fragment) | | | | | | | | | |
| 277 | 830207 | (AF016437) contains similarity to a C2H2-type zinc | gi\|2315332 | 173 | 1051 | 45 | 63 | HWLMF07 | Pancreas, | | |
| | | finger [Caenorhabditis elegans] >sp\|O16350\|O16350 | | | | | | | Colon | | |
| | | F13H6.1 PROTEIN. Length = 631 | | | | | | | | | |
| 278 | 830242 | | | 85 | 654 | | | HWLUF58 | Lung, | | |
| | | | | | | | | | Pancreas | | |
| 279 | 830328 | putative cyclin G1 interacting protein [Homo | gi\|2668505 | 304 | 954 | 81 | 81 | HWLEL26 | Lung, | | |
| | | sapiensi >sp\|O43257\|O43257 PUTATIVE CYCLIN | | | | | | | Colon, | | |
| | | G1 INTERACTING PROTEIN. Length = 154 | | | | | | | Breast/ | | |
| | | | | | | | | | Ovarian | | |
| 280 | 830340 | putative cell surface antigen [Rattus norvegicus] | gi\|1890275 | 1 | 336 | 63 | 81 | HWLEG68 | Pancreas, | | |
| | | >sp\|P97881\|P97881 PUTATIVE CELL SURFACE | | | | | | | Colon | | |
| | | ANTIGEN. Length = 547 | | | | | | | | | |
| 281 | 830341 | peroxisomal acyl-coenzyme A oxidase, AOX | bbs\|144907 | 1 | 648 | 100 | 100 | HSIAH79 | Lung, | | |
| | | [human, liver, Peptide, 661 aa] [Homo sapiens] | | | | | | | Pancreas | | |
| | | Length = 661 | | | | | | | | | |
| 282 | 830351 | | | 3 | 656 | | | HWHQT21 | Colon, | | |
| | | | | | | | | | Breast/ | | |
| | | | | | | | | | Ovarian | | |
| 283 | 830358 | | | 456 | 716 | | | HSUAE53 | Lung, | | |
| | | | | | | | | | Colon, | | |
| | | | | | | | | | Breast/ | | |
| | | | | | | | | | Ovarian | | |
| 284 | 830390 | platelet membrane glycoprotein IIIa beta subunit | gi\|2443452 | 2 | 523 | 90 | 90 | HWGQA69 | Pancreas, | | |
| | | [Homo sapiens] >sp\|O15495\|015495 PLATELET | | | | | | | Colon | | |
| | | MEMBRANE GLYCOPROTEIN IIIA BETA | | | | | | | | | |
| | | SUBUNIT. Length = 784 | | | | | | | | | |
| 285 | 830400 | phosphate carrier protein [Homo sapiens] | gi\|38262 | 2 | 1078 | 99 | 100 | HWHPY68 | Lung, | | |
| | | >pir\|B53737\|B53737 phosphate carrier protein, form | | | | | | | Pancreas, | | |
| | | B - human Length = 361 | | | | | | | Breast/ | | |
| | | | | | | | | | Ovarian | | |
| 286 | 830437 | IgG Fc receptor I [Homo sapiens] >gi\|292169 Fc | gi\|180279 | 3 | 1199 | 91 | 91 | HWABG32 | Lung, | | |
| | | gamma receptor I [Homo sapiens] | | | | | | | Colon | | |
| | | >pir\|A39878\|A39878 Fc gamma (IgG) receptor I-A | | | | | | | | | |
| | | (high affinity) precursor - human | | | | | | | | | |
| | | >sp\|Q92663\|Q92663 FC GAMMA RECEPTOR I. | | | | | | | | | |
| | | Length = 374 | | | | | | | | | |
| 287 | 830458 | HBp15/L22 [Sus scrofa] >gnl\|PID\|d1005074 | gnl\|PID\|d1005075 | 1 | 441 | 70 | 70 | HDQMF96 | Lung, | | |
| | | HBp1 5/L22 [Mus musculus] >pir\|JC2121\| | | | | | | | Pancreas | | |
| | | heparin-binding protein 15 - pig >pir\|JC2119\|JC2119 | | | | | | | | | |
| | | JC2119 heparin-binding protein 15 - mouse | | | | | | | | | |
| | | Length = 128 | | | | | | | | | |
| 288 | 830466 | | | 988 | 1260 | | | HOEEZ61 | Lung, | | |
| | | | | | | | | | Colon | | |
| 289 | 830497 | tenascin X [Homo sapiens] >sp\|P78530\|P78530 | gi\|1841546 | 2 | 1531 | 99 | 99 | HUFBX52 | Lung, | | |
| | | TENASCIN X (TENASCIN-X). >gi\|2347137 | | | | | | | Breast/ | | |
| | | (AF019413) tenascin X [Homo sapiens] {SUB 2593- | | | | | | | Ovarian | | |
| | | 4289} >pir\|A42175\|A42175 tenascin homolog | | | | | | | | | |
| | | 3.9kF3-3 - human (fragment) {SUB 2793-2880} | | | | | | | | | |
| | | >pir\|B42175\|B42175 tenascin homolog 3.9kF | | | | | | | | | |
| 290 | 830511 | carcinoembryonic antigen [Homo sapiens] | gi\|180223 | 3 | 1292 | 99 | 99 | HWLGV67 | Pancreas, | | |
| | | >gi\|178677 carcinoembryonic antigen precursor | | | | | | | Colon | | |
| | | [Homo sapiens] >pir\|A36319\|A36319 | | | | | | | | | |
| | | carcinoembryonic antigen precursor - human | | | | | | | | | |
| | | >sp\|P06731\|CCEM_HUMAN | | | | | | | | | |
| | | CARCINOEMBRYONIC ANTIGEN PRECURSOR | | | | | | | | | |
| | | (CEA) (MECONIUM ANTIGEN 100) (CD66E | | | | | | | | | |
| 291 | 830512 | carcinoembryonic antigen [Homo sapiens] | gi\|180223 | 3 | 2213 | 87 | 89 | HUFCI29 | Lung, | | |
| | | >gi\|178677 carcinoembryonic antigen precursor | | | | | | | Pancreas | | |
| | | [Homo sapiens] >pir\|A36319\|A36319 | | | | | | | | | |
| | | carcinoembryonic antigen precursor - human | | | | | | | | | |
| | | >sp\|P06731\|CCEM_HUMAN | | | | | | | | | |
| | | CARCINOEMBRYONIC ANTIGEN PRECURSOR | | | | | | | | | |
| | | (CEA) (MECONIUM ANTIGEN 100) (CD66E | | | | | | | | | |
| 292 | 830513 | | | 3 | 215 | | | HPRTG72 | Lung, | | |
| | | | | | | | | | Colon, | | |
| | | | | | | | | | Breast/ | | |
| | | | | | | | | | Ovarian | | |
| 293 | 830540 | protein kinase MUK2 [Rattus norvegicus] | gi\|1399508 | 2 | 733 | 100 | 100 | HTLHR67 | Lung, | | |
| | | >gi\|2772514 serine/threonine protein kinase [Rattus | | | | | | | Pancreas, | | |
| | | norvegicus] >sp\|P35465\|PAK1_RAT | | | | | | | Colon | | |
| | | SERINE/THREONINE-PROTEIN KINASE PAK- | | | | | | | | | |
| | | ALPHA (EC 2.7.1.-) (P68-PAK) (P21- | | | | | | | | | |
| | | ACTIVATED KINASE) (ALPHA-PAK) (PROTEIN | | | | | | | | | |
| | | KINASE MUK2). Length | | | | | | | | | |
| 294 | 830550 | guanine nucleotide-binding regulatory protein-beta-2 | gi\|386751 | 3 | 500 | 100 | 100 | HTWJC08 | Lung, | | |
| | | subunit [Homo sapiens] >gi\|339935 transducin beta- | | | | | | | Breast/ | | |
| | | 2 subunit [Homo sapiens] >gi\|3135310 (AF053356) | | | | | | | Ovarian | | |
| | | GNB2 [Homo sapiens] >pir\|B26617\|RGHUB2 GTP- | | | | | | | | | |
| | | binding regulatory protein beta-2 chain - human | | | | | | | | | |
| | | >sp\|P11016\|GB | | | | | | | | | |
| 295 | 830567 | | | 141 | 377 | | | HTTBH33 | Lung, | | |
| | | | | | | | | | Pancreas | | |
| 296 | 830586 | (2′-5′)oligoadenylate synthetase [Homo sapiens] | gnl\|PID\|d1000487 | 2 | 1192 | 98 | 98 | HKACP86 | Pancreas, | | |
| | | Length = 364 | | | | | | | Prostate, | | |
| | | | | | | | | | Breast/ | | |
| | | | | | | | | | Ovarian | | |
| 297 | 830632 | P2 gene for c subunit of mitochondrial ATP synthase | gi\|38432 | 264 | 803 | 85 | 85 | HTPCV95 | Lung, | | |
| | | gene product [Homo sapiens] >gnl\|PID\|d1002921 | | | | | | | Breast/ | | |
| | | ATP synthase subunit c precursor [Homo sapiens] | | | | | | | Ovarian | | |
| | | >pir\|S34067\|S34067 H+-transporting ATP synthase | | | | | | | | | |
| | | (EC 3.6.1.34) lipid-binding protein P2 precursor, | | | | | | | | | |
| | | mitochondri | | | | | | | | | |
| 298 | 830645 | propionyl CoA carboxylase beta subunit, beta PCC | bbs\|140816 | 54 | 1505 | 99 | 99 | HTEDS58 | Lung, | | |
| | | {EC 6.4.1.3} [human, liver, placenta, HL 1008, | | | | | | | Pancreas, | | |
| | | Peptide, 539 aa] [Homo sapiens] | | | | | | | Colon | | |
| | | >pir\|A53020\|A53020 propionyl-CoA carboxylase | | | | | | | | | |
| | | (EC 6.4.1.3) beta chain precursor - human | | | | | | | | | |
| | | >gi\|3036995 propionyl-CoA carboxylase B | | | | | | | | | |
| 299 | 830652 | strong homology to human RING3 sequence [Homo | gnl\|PID\|e1290115 | 1 | 177 | 64 | 64 | HUKFL74 | Lung, | | |
| | | sapiens] >sp\|O60885\|O60885 HUNKI MRNA. | | | | | | | Colon | | |
| | | Length = 722 | | | | | | | | | |
| 300 | 830659 | CDC42 GTP-binding protein [Canis familiaris] | gi\|887408 | 118 | 714 | 100 | 100 | HKAOE74 | Lung, | | |
| | | >gi\|183490 GTP-binding protein G25K [Homo | | | | | | | Pancreas, | | |
| | | sapiens] >gi\|29332l CDC42Mm [Mus musculus] | | | | | | | Breast/ | | |
| | | >gi\|1049309 CDC42 protein [Mus musculus] | | | | | | | Ovarian | | |
| | | >pir\|A39265\|A39265 GTP-binding protein G25K, | | | | | | | | | |
| | | placental - human >pir\|S57563\|S57563 CD | | | | | | | | | |
| 301 | 830696 | | | 2 | 514 | | | HSTBJ95 | Lung, | | |
| | | | | | | | | | Breast/ | | |
| | | | | | | | | | Ovarian | | |
| 302 | 830706 | | | 2457 | 2909 | | | HELFG05 | Pancreas, | | |
| | | | | | | | | | Breast/ | | |
| | | | | | | | | | Ovarian | | |
| 303 | 830743 | ATP SYNTHASE EPSILON CHAIN, | sp\|P56381\| | 53 | 262 | 100 | 100 | HCBBA51 | Lung, | | |
| | | MITOCHONDRIAL (EC 3,6.1.34). Length = 50 | ATPE_HUMAN | | | | | | Colon | | |
| 304 | 830770 | p21-activated protein kinase [Homo sapiens] | gi\|780808 | 1 | 498 | 99 | 99 | HEMCG27 | Lung, | | |
| | | >pir\|S58682\|S58682 protein kinase, p21-activated | | | | | | | Colon, | | |
| | | (EC 2.7.1.-) - human Length = 525 | | | | | | | Breast/ | | |
| | | | | | | | | | Ovarian | | |
| 305 | 830830 | (AF002822) cyclin B2 [Homo sapiens] | gi\|4101270 | 99 | 1358 | 99 | 99 | HROCE57 | Lung, | | |
| | | >sp\|G4101270\|G4101270 CYCLIN B2. Length = | | | | | | | Pancreas, | | |
| | | 398 | | | | | | | Colon | | |
| 306 | 830838 | | | 1 | 747 | | | HS2AF59 | Lung, | | |
| | | | | | | | | | Pancreas, | | |
| | | | | | | | | | Colon, | | |
| | | | | | | | | | Breast/ | | |
| | | | | | | | | | Ovarian | | |
| 307 | 830851 | | | 2 | 718 | | | HTXLJ25 | Pancreas, | | |
| | | | | | | | | | Colon | | |
| 308 | 830853 | | | 2 | 1183 | | | HRDDS42 | Pancreas, | | |
| | | | | | | | | | Colon | | |
| 309 | 830856 | | | 542 | 874 | | | HSAAX81 | Colon, | | |
| | | | | | | | | | Breast/Ovarian | | |
| 310 | 830862 | ribosomal protein [Homo sapiens] >gi\|453281 | gnl\|PID\|d1003910 | 3 | 518 | 100 | 100 | HLLCC05 | Lung, | | |
| | | ribosomal protein S23 [Rattus norvegicus] | | | | | | | Prostate, | | |
| | | >pir\|S41955\|S41955 ribosomal protein S23, | | | | | | | Breast/ | | |
| | | cytosolic - rat >pir\|S42105\|S42105 ribosomal | | | | | | | Ovarian | | |
| | | protein S23, cytosolic - human >pir\|152292\|152292 | | | | | | | | | |
| | | ribosomal protein S23 - rat >gnl | | | | | | | | | |
| 311 | 830879 | (AJ002120) Zfx [Monodelphis domestica] | gnl\|PID\|e354749 | 2 | 592 | 39 | 58 | HVAAB82 | Pancreas, | | |
| | | >sp\|O19019\|O19019 ZFX TYPE GENE | | | | | | | Colon | | |
| | | (FRAGMENT). Length = 180 | | | | | | | | | |
| 312 | 830919 | | | 69 | 536 | | | HOUHK65 | Pancreas, | | |
| | | | | | | | | | Breast/ | | |
| | | | | | | | | | Ovarian | | |
| 313 | 830969 | (AF005046) serine/threonine kinase [Homo sapiens] | gi\|4101587 | 140 | 514 | 96 | 96 | HOGAU20 | Pancreas, | | |
| | | >gnl\|PID\|e1371371 (AJ011855) PAK4 protein | | | | | | | Breast/ | | |
| | | [Homo sapiens] >sp\|G4101587\|G4101587 | | | | | | | Ovarian | | |
| | | SERINE/THREONINE KINASE. Length = 591 | | | | | | | | | |
| 314 | 830991 | insulin-like growth factor-binding protein [Homo | gi\|183116 | 2 | 607 | 86 | 86 | HDLAE73 | Pancreas, | | |
| | | sapiens] >gi\|386791 growth factor-binding protein-3 | | | | | | | Breast/ | | |
| | | [Homo sapiens] >gi\|398164 insulin-like growth | | | | | | | Ovarian | | |
| | | factor binding protein 3 [Homo sapiens] | | | | | | | | | |
| | | >pir\|A36578\|IOHU3 insulin-like growth factor- | | | | | | | | | |
| | | binding protein 3 precu | | | | | | | | | |
| 315 | 831002 | cyclin [Homo sapiens] >gi\|387005 proliferating cell | gi\|181272 | 168 | 974 | 100 | 100 | HOEMJ36 | Colon, | | |
| | | nuclear antigen (PCNA) [Homo sapiens] | | | | | | | Breast/ | | |
| | | >pir\|A27445\|WMHUET proliferating cell nuclear | | | | | | | Ovarian | | |
| | | antigen - human >sp\|P12004\|PCNA_HUMAN | | | | | | | | | |
| | | PROLIFERATING CELL NUCLEAR ANTIGEN | | | | | | | | | |
| | | (PCNA) (CYCLIN). Length = 261 | | | | | | | | | |
| 316 | 831003 | T-plastin - human >sp\|P13797\|PLST_HUMAN T- | pir\|A34789\| | 91 | 2007 | 94 | 95 | HAIBD64 | Lung, | | |
| | | PLASTIN. {SUB 4-630} >gi\|190028 T-plastin | A34789 | | | | | | Pancreas | | |
| | | polypeptide [Homo sapiens] {SUB 61-630} | | | | | | | | | |
| | | >gi\|339848 T-plastin [Homo sapiens] {SUB 1-143} | | | | | | | | | |
| | | >gi\|292832 T-plastin [Homo sapiens] {SUB 588- | | | | | | | | | |
| | | 630} Length = 630 | | | | | | | | | |
| 317 | 831021 | | | 474 | 662 | | | HE8BN45 | Pancreas, | | |
| | | | | | | | | | Colon, | | |
| | | | | | | | | | Breast/ | | |
| | | | | | | | | | Ovarian | | |
| 318 | 831036 | (AJ006068) dTDP-D-glucose 4,6-dehydratase | gnl\|PID\|e1363774 | 1 | 621 | 100 | 100 | HNTSQ61 | Pancreas, | | |
| | | [Homo sapiens] >sp\|E1363774\|E1363774 DTDP-D- | | | | | | | Colon | | |
| | | GLUCOSE 4,6-DEHYDRATASE (EC 4.2.1.46). | | | | | | | | | |
| | | Length = 350 | | | | | | | | | |
| 319 | 831071 | lrp gene product [Homo sapiens] | gi\|895840 | 67 | 2610 | 94 | 94 | HWLEG93 | Lung, | | |
| | | >pir\|S57723\|S57723 lrp protein - human | | | | | | | Pancreas | | |
| | | >sp\|Q14764\|MVP_HUMAN MAJOR VAULT | | | | | | | | | |
| | | PROTEIN (MVP) (LUNG RESISTANCE- | | | | | | | | | |
| | | RELATED PROTEIN). Length = 896 | | | | | | | | | |
| 320 | 831094 | | | 755 | 928 | | | HNFEO67 | Colon, | | |
| | | | | | | | | | Breast/ | | |
| | | | | | | | | | Ovarian | | |
| 321 | 831099 | fibronectin receptor beta subunit precursor (AA - 20 | gi\|31442 | 3 | 1697 | 99 | 100 | HA5AB03 | Lung, | | |
| | | to 778) [Homo sapiens] >pir\|B27079\|B27079 | | | | | | | Pancreas, | | |
| | | fibronectin receptor beta chain precursor - human | | | | | | | Colon, | | |
| | | >sp\|P05556\|ITB1_HUMAN FIBRONECTIN | | | | | | | Breast/ | | |
| | | RECEPTOR BETA SUBUNIT PRECURSOR | | | | | | | Ovarian | | |
| | | (INTEGRIN BETA-1) (CD29) (INTEGRIN VLA-4 | | | | | | | | | |
| | | BETA | | | | | | | | | |
| 322 | 831113 | 4E-binding protein 1 [Homo sapiens] | gi\|561630 | 1 | 414 | 100 | 100 | HMWHP74 | Lung, | | |
| | | >pir\|S50866\|S50866 4E-BP1 protein - human | | | | | | | Pancreas, | | |
| | | >pir\|JC5899\|JC5899 initiation factor 4E-binding | | | | | | | Colon, | | |
| | | protein 1 - human >sp\|Q13541\|Q13541 4E- | | | | | | | Breast/ | | |
| | | BINDING PROTEIN 1. Length = 118 | | | | | | | Ovarian | | |
| 323 | 831120 | | | 1 | 1221 | | | HWLHY12 | Pancreas, | | |
| | | | | | | | | | Colon | | |
| 324 | 831172 | Similarity to Human hnRNP F protein (PIR Acc. No. | gnl\|PID\|e1349655 | 2 | 721 | 52 | 66 | HLWBE22 | Pancreas, | | |
| | | S43484); | | | | | | | Breast/ | | |
| | | | | | | | | | Ovarian | | |
| 325 | 831178 | (AF042501) cytochrome b [Homo sapiens] | gi\|3372365 | 512 | 829 | 69 | 70 | HDLAG61 | Lung, | | |
| | | >sp\|O78829\|O78829 CYTOCHROME B | | | | | | | Colon | | |
| | | (FRAGMENT). Length = 380 | | | | | | | | | |
| 326 | 831184 | | | 770 | 1399 | | | HWLGP91 | Lung, | | |
| | | | | | | | | | Pancreas, | | |
| | | | | | | | | | Colon | | |
| 327 | 831203 | | | 3 | 545 | | | HMICQ42 | Pancreas, | | |
| | | | | | | | | | Colon, | | |
| | | | | | | | | | Breast/ | | |
| | | | | | | | | | Ovarian | | |
| 328 | 831210 | TGF-beta masking protein large subunit [Rattus | gi\|207286 | 1 | 498 | 86 | 91 | HMEIJ62 | Pancreas, | | |
| | | norvegicus] >pir\|A38261\|A38261 masking protein | | | | | | | Colon | | |
| | | precursor - rat Length = 1712 | | | | | | | | | |
| 329 | 831228 | | | 104 | 214 | | | HMEAM30 | Lung, | | |
| | | | | | | | | | Pancreas, | | |
| | | | | | | | | | Breast/ | | |
| | | | | | | | | | Ovarian | | |
| 330 | 831256 | MLN 64 [Homo sapiens] >dbj∥D38255_I CAB1 | gi\|951279 | 658 | 1164 | 94 | 94 | HMTBL29 | Lung, | | |
| | | [Homo sapiens] >pir\|I38027\|I38027 MLN 64 | | | | | | | Pancreas | | |
| | | protein - human >sp\|Q14849\|Q14849 MLN64 | | | | | | | | | |
| | | MRNA. Length = 445 | | | | | | | | | |
| 331 | 831257 | MLN 64 [Homo sapiens] >dbj∥D38255_1 CAB1 | gi\|951279 | 323 | 862 | 91 | 91 | HLWDQ05 | Pancreas, | | |
| | | [Homo sapiens] >pir\|I38027\|I38027 MLN 64 | | | | | | | Colon | | |
| | | protein - human >sp\|Q14849\|Q14849 MLN64 | | | | | | | | | |
| | | MRNA. Length = 445 | | | | | | | | | |
| 332 | 831277 | | | 3 | 1310 | | | HUTHD56 | Lung, | | |
| | | | | | | | | | Pancreas, | | |
| | | | | | | | | | Colon | | |
| 333 | 831317 | inter-alpha-trypsin inhibitor light chain [Homo | gi\|186600 | 193 | 1290 | 100 | 100 | HLQAC21 | Pancreas, | | |
| | | sapiens] >gi\|32047 HC polypeptide [Homo sapiens] | | | | | | | Breast/ | | |
| | | >gi\|24479 precursor polypeptide [Homo sapiens] | | | | | | | Ovarian | | |
| | | >gi\|825614 alphal-microglobulin [Homo sapiens] | | | | | | | | | |
| | | >pir\|S13433\|HCHU alpha-1-microglobulin/inter | | | | | | | | | |
| | | alpha-trypsin inhib | | | | | | | | | |
| 334 | 831339 | (AB012276) ATFx [Mus musculus] | gnl\|PID\|d1026241 | 631 | 1029 | 90 | 93 | HLICC93 | Lung, | | |
| | | >sp\|O70191\|O70191 ATFX (FRAGMENT). | | | | | | | Colon, | | |
| | | >sp\|G246896\|G246896 ATFX = ATF4 RELATED | | | | | | | Breast/ | | |
| | | PROTEIN. {SUB 1-37} >sp\|G246899\|G246899 | | | | | | | Ovarian | | |
| | | ATFX = ATF-4-RELATED PROTEIN. {SUB 38-76} | | | | | | | | | |
| | | Length = 84 | | | | | | | | | |
| 335 | 831363 | acyl coenzyme A:cholesterol acyltransferase, | bbs\|156481 | 123 | 1871 | 98 | 98 | HLDNR55 | Lung, | | |
| | | carboxylesterase, ACAT {EC 2.3.1.26} [human, | | | | | | | Colon | | |
| | | liver, Peptide, 568 aa] [Homo sapiens] | | | | | | | | | |
| | | >sp\|G415564\|G415564 CARBOXYLESTERASE | | | | | | | | | |
| | | {EC 3.1.1.1}. {SUB 20-568} >gi\|179930 | | | | | | | | | |
| | | carboxylesterase [Homo sapiens] {SUB 62-568} | | | | | | | | | |
| | | Length | | | | | | | | | |
| 336 | 831367 | D-dopachrome tautomerase [Homo sapiens] | gi\|1805303 | 325 | 618 | 100 | 100 | HLDDR74 | Lung, | | |
| | | >gi\|1864028 D-dopachrome tautomerase [Homo | | | | | | | Colon | | |
| | | sapiens] >gi\|3047378 (AF058293) D-dopachrome | | | | | | | | | |
| | | tautomerase [Homo sapiens] >gnl\|PID\|e311354 | | | | | | | | | |
| | | phenylpyruvate tautomerase II [Homo sapiens] | | | | | | | | | |
| | | >gi\|235291 5 (AF012434) D-dopachrome ta | | | | | | | | | |
| 337 | 831379 | cDNA from hypercalcemic tumour [Rattus | gi\|57064 | 3 | 383 | 90 | 95 | HKQAC03 | Lung, | | |
| | | norvegicus] >pir\|S28223\|S28223 parathyroid | | | | | | | Pancreas | | |
| | | hormone-like protein - rat >sp\|Q05310\|L10K_RAT | | | | | | | Colon, | | |
| | | LEYDIG CELL TUMOR 10 KD PROTEIN. Length = | | | | | | | Breast/ | | |
| | | 93 | | | | | | | Ovarian | | |
| 338 | 831385 | | | 96 | 377 | | | HKIMC75 | Lung, | | |
| | | | | | | | | | Pancreas, | | |
| | | | | | | | | | Colon, | | |
| | | | | | | | | | Breast/ | | |
| | | | | | | | | | Ovarian | | |
| 339 | 831390 | aldehyde reductase (EC 1.1.1.2) [Homo sapiens] | gi\|178481 | 254 | 1312 | 94 | 94 | HKGDF04 | Lung, | | |
| | | >gi\|2707824 (AF036683) aldehyde reductase [Homo | | | | | | | Pancreas | | |
| | | sapiens] >pir\|A33851\|A33851 alcohol | | | | | | | | | |
| | | dehydrogenase (NADP+) (EC 1.1.1.2) - human | | | | | | | | | |
| | | >sp\|G2707824\|G2707824 ALDEHYDE | | | | | | | | | |
| | | REDUCTASE. >sp\|P14550\|ALDX_HUMAN | | | | | | | | | |
| | | ALCOHOL DEHYDROGE | | | | | | | | | |
| 340 | 831391 | islet regenerating protein [Homo sapiens] | gi\|190979 | 71 | 592 | 100 | 100 | HLDBE06 | Pancreas, | | |
| | | >pir\|A35197\|RGHU1A regenerating islet lectin 1- | | | | | | | Colon | | |
| | | alpha precursor - human | | | | | | | | | |
| | | >sp\|P05451\|LITA_HUMAN LITHOSTATHINE 1 | | | | | | | | | |
| | | ALPHA PRECURSOR (PANCREATIC STONE | | | | | | | | | |
| | | PROTEIN) (PSP) (PANCREATIC THREAD | | | | | | | | | |
| | | PROTEIN) (PTP) (ISLET OF LANGERHANS | | | | | | | | | |
| 341 | 831405 | factor H homologue [Homo sapiens] | gi\|183763 | 53 | 1078 | 94 | 94 | HLDOB31 | Lung, | | |
| | | >pir\|I56100\|I56100 factor H homologue - human | | | | | | | Pancreas | | |
| | | >sp\|Q03591\|CFH1_HUMAN COMPLEMENT | | | | | | | Colon, | | |
| | | FACTOR H-LIKE PROTEIN 1 PRECURSOR | | | | | | | Breast/ | | |
| | | (H36). Length = 330 | | | | | | | Ovarian | | |
| 342 | 831442 | PDGF associated protein [Homo sapiens] | gi\|1136584 | 2 | 595 | 60 | 60 | HKAEB15 | Lung, | | |
| | | >sp\|Q13442\|HP28_HUMAN 28 KD HEAT - AND | | | | | | | Pancreas, | | |
| | | ACID-STABLE PHOSPHOPROTEIN (HASPP28) | | | | | | | Colon, | | |
| | | (PDGF ASSOCIATED PROTEIN). Length = 181 | | | | | | | Breast/ | | |
| | | | | | | | | | Ovarian | | |
| 343 | 831476 | dermatopontin [Homo sapiens] >pir\|A47220\|A47220 | gi\|311614 | 1 | 630 | 91 | 91 | HJMBK21 | Lung, | | |
| | | dermatopontin precursor - human | | | | | | | Pancreas, | | |
| | | >sp\|Q07507\|DERM_HUMAN DERMATOPONTIN | | | | | | | Colon | | |
| | | PRECURSOR. >pir\|S34838\|S34838 tyrosine-rich | | | | | | | | | |
| | | acidic matrix protein - pig {SUB 101-144} | | | | | | | | | |
| | | Length = 201 | | | | | | | | | |
| 344 | 831488 | similar to Saccharomyces cerevisiae Spt4; protein | gi\|1209779 | 158 | 580 | 100 | 100 | HJBCG39 | Colon, | | |
| | | has potential N-terminal zinc-finger [Homo sapiens] | | | | | | | Breast/ | | |
| | | >gi\|1401053 SUPT4H [Homo sapiens] >gi\|1401055 | | | | | | | Ovarian | | |
| | | SUPT4H [Homo sapiens] >gi\|1401066 Supt4h [Mus | | | | | | | | | |
| | | musculus] >gi\|3779194 chromatin structural protein | | | | | | | | | |
| | | homolog [M | | | | | | | | | |
| 345 | 831518 | | | 240 | 467 | | | HATCV09 | Pancreas, | | |
| | | | | | | | | | Colon, | | |
| | | | | | | | | | Breast/ | | |
| | | | | | | | | | Ovarian | | |
| 346 | 831519 | (AF062536) cullin 1 [Homo sapiens] | gi\|3139077 | 165 | 1712 | 100 | 100 | HOECI49 | Pancreas, | | |
| | | >sp\|O60719\|O60719 CULLIN 1. >gi\|4153866 | | | | | | | Breast/ | | |
| | | (AC005229) cullin 1 [Homo sapiens] {SUB 1-263} | | | | | | | Ovarian | | |
| | | Length = 776 | | | | | | | | | |
| 347 | 831521 | | | 3 | 863 | | | HIBCE91 | Colon, | | |
| | | | | | | | | | Breast/ | | |
| | | | | | | | | | Ovarian | | |
| 348 | 831550 | mel-13a protein - mouse Length = 132 | pir\|S65785\| | 158 | 457 | 70 | 75 | HCHNH46 | Lung, | | |
| | | | S65785 | | | | | | Pancreas, | | |
| | | | | | | | | | Breast/ | | |
| | | | | | | | | | Ovarian | | |
| 349 | 831560 | | | 1474 | 1818 | | | HCROA68 | Pancreas, | | |
| | | | | | | | | | Breast/ | | |
| | | | | | | | | | Ovarian | | |
| 350 | 831562 | fibromodulin [Homo sapiens] | gi\|297091 | 28 | 1272 | 90 | 91 | HEGAD80 | Pancreas, | | |
| | | >sp\|Q06828\|FMOD_HUMAN FIBROMODULIN | | | | | | | Breast/ | | |
| | | PRECURSOR (FM) (COLLAGEN-BINDING 59 | | | | | | | Ovarian | | |
| | | KD PROTEIN). Length = 376 | | | | | | | | | |
| 351 | 831570 | (AF042822) epithin [Mus musculus] | gi\|4104970 | 2 | 1861 | 77 | 85 | HLWCC68 | Lung, | | |
| | | >sp\|G4104970\|G4104970 EPITHIN. Length = 902 | | | | | | | Pancreas, | | |
| | | | | | | | | | Colon | | |
| 352 | 831593 | | | 726 | 878 | | | HHBFW28 | Lung, | | |
| | | | | | | | | | Pancreas | | |
| 353 | 831596 | 32 kd accessory protein [Bos taurus] >gi\|190376 | gi\|736727 | 2 | 808 | 100 | 100 | HHEDJ61 | Colon, | | |
| | | proton ATPase accessory subunit [Homo sapiens] | | | | | | | Breast/ | | |
| | | {SUB 264-351} Length = 351 | | | | | | | Ovarian | | |
| 354 | 831627 | | | 1 | 903 | | | HBJHI46 | Lung, | | |
| | | | | | | | | | Pancreas | | |
| 355 | 831649 | | | 1 | 738 | | | HFTDD09 | Lung, | | |
| | | | | | | | | | Colon | | |
| 356 | 831664 | transformation upregulated nuclear protein - human | pir\|S43363\| | 180 | 1574 | 94 | 94 | HFPCU40 | Lung, | | |
| | | Length = 464 | S43363 | | | | | | Colon | | |
| 357 | 831674 | complement protein C8 beta subunit precursor | gi\|179720 | 1 | 1338 | 96 | 96 | HLDOX36 | Pancreas, | | |
| | | [Homo sapiens] >pir\|A43071\|C8HUB complement | | | | | | | Colon | | |
| | | C8 beta chain precursor - human | | | | | | | | | |
| | | >sp\|P07358\|CO8B_HUMAN COMPLEMENT | | | | | | | | | |
| | | COMPONENT C8 BETA CHAIN PRECURSOR. | | | | | | | | | |
| | | Length = 591 | | | | | | | | | |
| 358 | 831684 | (AF053630) monocyte/neutrophil elastase inhibitor | gi\|2997692 | 1 | 1311 | 96 | 96 | HFOXE22 | Pancreas, | | |
| | | [Homo sapiens] >pir\|S27383\|S27383 elastase | | | | | | | Colon | | |
| | | inhibitor - human >sp\|P30740\|ILEU_HUMAN | | | | | | | | | |
| | | LEUKOCYTE ELASTASE INHIBITOR (LEI) | | | | | | | | | |
| | | (MONOCYTE/NEUTROPHIL ELASTASE | | | | | | | | | |
| | | INHIBITOR) (EI). >sp\|G2997692\|G2997692 | | | | | | | | | |
| | | MONOCYTE/NEUTROPHI | | | | | | | | | |
| 359 | 831687 | Mpv17 [Mus musculus] >pir\|S29031\|S29031 mpv17 | gi\|199790 | 60 | 305 | 89 | 93 | HFKHD75 | Pancreas, | | |
| | | protein - mouse >sp\|P19258\|MPV1_MOUSE | | | | | | | Colon | | |
| | | MPV17 PROTEIN. >gi\|3252875 (AF038632) | | | | | | | | | |
| | | Mpv17 protein [Mus musculus] {SUB 155-176} | | | | | | | | | |
| | | Length = 176 | | | | | | | | | |
| 360 | 831726 | rat ribosomal protein L36 [Rattus norvegicus] | gi\|312345 | 77 | 454 | 98 | 98 | HAGDQ96 | Lung, | | |
| | | >pir\|JN0483\|JN0483 ribosomal protein L36 - rat | | | | | | | Breast/ | | |
| | | Length = 105 | | | | | | | Ovarian | | |
| 361 | 831736 | | | 95 | 484 | | | HLWEQ18 | Colon, | | |
| | | | | | | | | | Breast/ | | |
| | | | | | | | | | Ovarian | | |
| 362 | 831762 | | | 37 | 720 | | | HEQBI79 | Pancreas, | | |
| | | | | | | | | | Colon | | |
| 363 | 831801 | ear-2 gene product [Homo sapiens] | gi\|31065 | 3 | 812 | 76 | 77 | HKAHB85 | Lung, | | |
| | | >pir\|S02709\|S02709 ear-2 protein - human | | | | | | | Pancreas, | | |
| | | >sp\|P10588\|EAR2_HUMAN V-ERBA RELATED | | | | | | | Breast/ | | |
| | | PROTEIN EAR-2. Length = 403 | | | | | | | Ovarian | | |
| 364 | 831848 | | | 2018 | 2284 | | | HE8AF82 | Lung, | | |
| | | | | | | | | | Colon, | | |
| | | | | | | | | | Breast/ | | |
| | | | | | | | | | Ovarian | | |
| 365 | 831861 | (AF076786) serum amyloid A-activating factor | gi\|3986442 | 341 | 775 | 77 | 77 | HJPCX51 | Lung, | | |
| | | SAF-8 [Oryctolagus cuniculus] >sp\|G3986442\| | | | | | | | Pancreas, | | |
| | | G3986442 SERUM AMYLOID A-ACTIVATING | | | | | | | Breast/ | | |
| | | FACTOR SAF-8 (FRAGMENT). Length = 214 | | | | | | | Ovarian | | |
| 366 | 831866 | (AF054174) histone macroH2A1.2 [Homo sapiens] | gi\|3341992 | 53 | 1186 | 100 | 100 | HE6FG90 | Lung, | | |
| | | >sp\|G3341992\|G3341992 HISTONE | | | | | | | Colon | | |
| | | MACROH2A1.2. Length = 371 | | | | | | | | | |
| 367 | 831878 | | | 2 | 661 | | | HDTLN67 | Colon, | | |
| | | | | | | | | | Breast/ | | |
| | | | | | | | | | Ovarian | | |
| 368 | 831899 | | | 1 | 693 | | | HDTBQ51 | Colon, | | |
| | | | | | | | | | Breast/ | | |
| | | | | | | | | | Ovarian | | |
| 369 | 831913 | nuclear antigen H731 [Homo sapiens] | gi\|1825562 | 95 | 1132 | 96 | 97 | HLYGA31 | Lung, | | |
| | | >pir\|JC5193\|JC5193 nuclear protein H731 - human | | | | | | | Colon | | |
| | | >sp\|Q99834\|Q99834 NUCLEAR ANTIGEN H731. | | | | | | | | | |
| | | Length = 458 | | | | | | | | | |
| 370 | 831972 | p619 [Homo sapiens] >pir\|S71752\|S71752 giant | gi\|1477565 | 331 | 855 | 33 | 58 | HDPKK57 | Lung, | | |
| | | protein p619 - human >sp\|Q15751\|Q15751 P619. | | | | | | | Pancreas, | | |
| | | Length = 4861 | | | | | | | Breast/ | | |
| | | | | | | | | | Ovarian | | |
| 371 | 831985 | | | 425 | 805 | | | HDPFP36 | Lung, | | |
| | | | | | | | | | Pancreas, | | |
| | | | | | | | | | Colon, | | |
| | | | | | | | | | Breast/ | | |
| | | | | | | | | | Ovarian | | |
| 372 | 831986 | | | 30 | 467 | | | HCHCH68 | Pancreas, | | |
| | | | | | | | | | Colon, | | |
| | | | | | | | | | Breast/ | | |
| | | | | | | | | | Ovarian | | |
| 373 | 832010 | (AL021918) b3418.1 (Kruppel related Zinc Finger | gnl\|PID\|e1293199 | 1 | 348 | 57 | 69 | HDFUB44 | Lung, | | |
| | | protein 184) [Homo sapiens] >sp\|O60792\|O60792 | | | | | | | Pancreas, | | |
| | | B34I8.1 (KRUPPEL RELATED ZINC FINGER | | | | | | | Colon | | |
| | | PROTEIN 184). Length = 751 | | | | | | | | | |
| 374 | 832016 | C protein (AA 1-159) [Homo sapiens] | gi\|37543 | 2 | 604 | 100 | 100 | HTTDG34 | Lung, | | |
| | | >pir\|S01387\|S01387 U1 snRNP protein C - human | | | | | | | Breast/ | | |
| | | Length = 159 | | | | | | | Ovarian | | |
| 375 | 832041 | metalloelastase HME (EC 3.4.24.-) - human | pir\|A49499\| | 54 | 1472 | 100 | 100 | HDPGC33 | Lung, | | |
| | | >sp\|P39900\|COGM_HUMAN MACROPHAGE | A49499 | | | | | | Pancreas, | | |
| | | METALLOELASTASE PRECURSOR (EC | | | | | | | Colon | | |
| | | 3.4.24.65) (HME) (MATRIX | | | | | | | | | |
| | | METALLOPROTEINASE-12) (MMP-12). Length = | | | | | | | | | |
| | | 470 | | | | | | | | | |
| 376 | 832044 | 5-aminoimidazole-4-carboxamide-1-beta-D-ribo- | gnl\|PID\|d1012226 | 1 | 1794 | 99 | 99 | HGCOL40 | Lung, | | |
| | | nucleotide transformylase/inosinicase [Homo sapiens] | | | | | | | Pancreas, | | |
| | | >gnl\|PID\|d10226l7 5-aminoimidazole-4- | | | | | | | Colon, | | |
| | | carboxamide ribonucleotide transformylase [Homo | | | | | | | Breast/ | | |
| | | sapiens] >pir\|JC4642\|JC4642 purH bifunctional | | | | | | | Ovarian | | |
| | | enzyme - human >sp\|Q13856\| | | | | | | | | | |
| 377 | 832049 | proteasome subunit HsC10-II [Homo sapiens] | gnl\|PID\|d1006190 | 84 | 710 | 99 | 100 | HCFAU68 | Lung, | | |
| | | >pir\|S55041\|S55041 multicatalytic endopeptidase | | | | | | | Pancreas, | | |
| | | complex (EC 3.4.99.46) beta chain C10-II - human | | | | | | | Breast/ | | |
| | | >sp\|P49720\|PRCT_HUMAN PROTEASOME | | | | | | | Ovarian | | |
| | | THETA CHAIN (EC 3.4.99.46) (MACROPAIN | | | | | | | | | |
| | | THETA CHAIN) (MULTICATALYTIC | | | | | | | | | |
| | | ENDOPEPTIDASE C | | | | | | | | | |
| 378 | 832122 | | | 427 | 846 | | | HCUDT18 | Lung, | | |
| | | | | | | | | | Pancreas, | | |
| | | | | | | | | | Colon, | | |
| | | | | | | | | | Breast/ | | |
| | | | | | | | | | Ovarian | | |
| 379 | 832148 | | | 246 | 380 | | | HFIHN81 | Colon, | | |
| | | | | | | | | | Breast/ | | |
| | | | | | | | | | Ovarian | | |
| 380 | 832197 | | | 433 | 642 | | | HCQAH51 | Pancreas, | | |
| | | | | | | | | | Breast/ | | |
| | | | | | | | | | Ovarian | | |
| 381 | 832237 | | | 290 | 553 | | | HOCTE23 | Lung, | | |
| | | | | | | | | | Colon | | |
| 382 | 832246 | | | 66 | 959 | | | HCMSD61 | Lung, | | |
| | | | | | | | | | Pancreas | | |
| 383 | 832256 | ligand for eph-related receptor tyrosine kinases | gi\|1469782 | 1 | 81 | 100 | 100 | HBXAC19 | Pancreas, | | |
| | | [Homo sapiens] >gi\|1809292 putative EPH-related | | | | | | | Colon, | | |
| | | PTK receptor ligand LERK-8 [Homo sapiens] | | | | | | | Breast/ | | |
| | | >sp\|Q15768\|EFB3_HUMAN EPHRIN-B3 | | | | | | | Ovarian | | |
| | | PRECURSOR (EPH-RELATED RECEPTOR | | | | | | | | | |
| | | TYROSINE KINASE LIGAND 8) (LERK-8) (EPH- | | | | | | | | | |
| | | RELATED RECE | | | | | | | | | |
| 384 | 832280 | (AF071747) topoisomerase II alpha [Homo sapiens] | gi\|3869316 | 2 | 1141 | 79 | 79 | HNTSQ37 | Lung, | | |
| | | >sp\|G3869316\|G3869316 TOPOISOMERASE II | | | | | | | Colon, | | |
| | | ALPHA. Length = 1531 | | | | | | | Breast/ | | |
| | | | | | | | | | Ovarian | | |
| 385 | 832285 | | | 1550 | 1783 | | | HLTBQ50 | Lung, | | |
| | | | | | | | | | Prostate | | |
| 386 | 832294 | | | 1 | 666 | | | HBMCR80 | Lung, | | |
| | | | | | | | | | Colon | | |
| 387 | 832326 | | | 472 | 1131 | | | HJPAT43 | Lung, | | |
| | | | | | | | | | Colon, | | |
| | | | | | | | | | Breast/ | | |
| | | | | | | | | | Ovarian | | |
| 388 | 832333 | CENP-B protein [Ovis aries] | gi\|1016292 | 3 | 551 | 96 | 96 | HCHMS55 | Pancreas, | | |
| | | >sp\|P49451\|CENB_SHEEP MAJOR | | | | | | | Breast/ | | |
| | | CENTROMERE AUTOANTIGEN B | | | | | | | Ovarian | | |
| | | (CENTROMERE PROTEIN B) (CENP-B) | | | | | | | | | |
| | | (FRAGMENT). Length = 239 | | | | | | | | | |
| 389 | 832346 | | | 295 | 471 | | | HBAGU45 | Colon, | | |
| | | | | | | | | | Breast/ | | |
| | | | | | | | | | Ovarian | | |
| 390 | 832370 | HER2 receptor [Homo sapiens] >gi\|553282 c-erb-2 | gi\|306840 | 2 | 406 | 83 | 83 | HFIEC83 | Lung, | | |
| | | protein [Homo sapiens] {SUB 737-1031} | | | | | | | Breast/ | | |
| | | >gi\|553332 HER-2/neu [Homo sapiens] {SUB 1- | | | | | | | Ovarian | | |
| | | 191} >gi\|183989 HER2 receptor (AA at 3) [Homo | | | | | | | | | |
| | | sapiens] {SUB 740-910} >gi\|182169 c-erb B2/neu | | | | | | | | | |
| | | protein [Homo sapiens] {SUB 1081- | | | | | | | | | |
| 391 | 832381 | | | 138 | 539 | | | HATAA19 | Pancreas, | | |
| | | | | | | | | | Breast/ | | |
| | | | | | | | | | Ovarian | | |
| 392 | 832394 | platelet-endothelial tetraspan antigen 3 [Homo | gi\|541613 | 2 | 847 | 85 | 85 | HFITD21 | Lung, | | |
| | | sapiens] >sp\|P48509\|C151_HUMAN PLATELET- | | | | | | | Pancreas | | |
| | | ENDOTHELIAL TETRASPAN ANTIGEN 3 | | | | | | | | | |
| | | (PETA-3) (GP27) (MEMBRANE | | | | | | | | | |
| | | GLYCOPROTEIN SFA-1) (CD151 ANTIGEN). | | | | | | | | | |
| | | Length = 253 | | | | | | | | | |
| 393 | 832454 | precursor polypeptide [Homo sapiens] | gi\|34628 | 160 | 357 | 100 | 100 | HLQBT44 | Prostate, | | |
| | | >pir\|A25971\|C2HU complement C2 precursor - | | | | | | | Breast/ | | |
| | | human >gi\|187765 MHC complement component | | | | | | | Ovarian | | |
| | | C2 [Homo sapiens] {SUB 21-46} Length = 752 | | | | | | | | | |
| 394 | 832465 | | | 1 | 324 | | | HAJBC51 | Lung, | | |
| | | | | | | | | | Pancreas | | |
| 395 | 832475 | X box binding protein-1 [Homo sapiens] | gi\|306893 | 470 | 817 | 100 | 100 | HTJMJ52 | Pancreas, | | |
| | | >pir\|A36299\|A36299 transcription factor hXBP-1 - | | | | | | | Breast/ | | |
| | | human Length = 260 | | | | | | | Ovarian | | |
| 396 | 832495 | EB1 [Homo sapiens] >pir\|I52726\|I52726 EB1 - | gi\|998357 | 1 | 933 | 100 | 100 | HAIDB85 | Lung, | | |
| | | human >sp\|Q15691\|Q15691 EB1. Length = 268 | | | | | | | Pancreas | | |
| 397 | 832498 | pyrroline-5-carboxylate synthase [Homo sapiens] | gi\|4097816 | 2 | 1036 | 95 | 95 | HLTGQ24 | Lung, | | |
| | | >sp\|G4097816\|G4097816 PYRROLINE-5- | | | | | | | Pancreas | | |
| | | CARBOXYLATE SYNTHASE. Length = 793 | | | | | | | | | |
| 398 | 832501 | | | 736 | 996 | | | HAGFI57 | Lung, | | |
| | | | | | | | | | Pancreas, | | |
| | | | | | | | | | Colon | | |
| 399 | 832505 | protein synthesis factor [Homo sapiens] | gi\|306725 | 61 | 648 | 100 | 100 | HRABV57 | Lung, | | |
| | | >sp\|P47813\|IF1A_HUMAN EUKARYOTIC | | | | | | | Pancreas, | | |
| | | TRANSLATION INITIATION FACTOR 1A (EIF- | | | | | | | Prostate | | |
| | | 1A) (EIF-4C). {SUB 2-144} Length = 144 | | | | | | | | | |
| 400 | 832539 | protein synthesis initiation factor 4A [Mus | gi\|673433 | 472 | 1125 | 93 | 93 | HRABO69 | Lung, | | |
| | | musculus] Length = 408 | | | | | | | Breast/ | | |
| | | | | | | | | | Ovarian | | |
| 401 | 832554 | HsGCN1 [Homo sapiens] >sp\|Q99736\|Q99736 | gi\|2282576 | 409 | 927 | 99 | 99 | HCHOX71 | Pancreas, | | |
| | | HSGCN1 (FRAGMENT). Length = 1928 | | | | | | | Breast/ | | |
| | | | | | | | | | Ovarian | | |
| 402 | 832569 | | | 2 | 667 | | | HFCAE43 | Lung, | | |
| | | | | | | | | | Colon | | |
| 403 | 832578 | (AL023777) ma binding protein | gnl\|PID\|e1295805 | 123 | 956 | 40 | 64 | HBBBD67 | Pancreas, | | |
| | | [Schizosaccharomyces pombe] >sp\|O74978\|O74978 | | | | | | | Colon, | | |
| | | RNA BINDING PROTEIN. Length = 276 | | | | | | | Breast/ | | |
| | | | | | | | | | Ovarian | | |
| 404 | 832615 | | | 630 | 992 | | | H2CBK94 | Lung, | | |
| | | | | | | | | | Colon | | |
| 405 | 832620 | | | 190 | 297 | | | H2CBG53 | Colon, | | |
| | | | | | | | | | Breast/ | | |
| | | | | | | | | | Ovarian | | |
| 406 | 832632 | (AC002388) 60S ribosomal protein L30 isolog | gi\|2344898 | 41 | 592 | 52 | 69 | H2CBD94 | Lung, | | |
| | | [Arabidopsis thaliana] >sp\|O22165\|O22165 60S | | | | | | | Colon, | | |
| | | RIBOSOMAL PROTEIN L30 ISOLOG. Length = | | | | | | | Breast/ | | |
| | | 159 | | | | | | | Ovarian | | |
| 407 | 832633 | putative phospho-beta-glucosidase [Bacillus | gi\|466475 | 3 | 566 | 52 | 64 | HWACF51 | Pancreas, | | |
| | | stearothermophilus] >pir\|D49898\|D49898 cellobiose | | | | | | | Breast/ | | |
| | | phosphotransferase system celC - Bacillus | | | | | | | Ovarian | | |
| | | stearothermophilus >sp\|Q45401\|Q45401 | | | | | | | | | |
| | | PUTATIVE PHOSPHO-BETA-GLUCOSIDASE. | | | | | | | | | |
| | | Length = 245 | | | | | | | | | |
| 408 | 833483 | | | 2 | 604 | | | HCFCK33 | Lung, | | |
| | | | | | | | | | Breast/ | | |
| | | | | | | | | | Ovarian | | |
| 409 | 834574 | similar to S. cerevisiae longevity-assurance protein 1 | gi\|1123105 | 634 | 1431 | 44 | 59 | HHBEI26 | Lung, | | |
| | | (SP:P38703) [Caenorhabditis elegans] | | | | | | | Pancreas, | | |
| | | >sp\|Q17870\|Q17870 SIMILAR TO S. CEREVISIAE | | | | | | | Colon, | | |
| | | LONGEVITY-ASSURANCE PROTEIN 1. Length = | | | | | | | Breast/ | | |
| | | 362 | | | | | | | Ovarian | | |
| 410 | 834859 | acidic calponin [human, kidney, Peptide, 329 aa] | bbs\|174416 | 53 | 541 | 99 | 100 | HSTAT70 | Lung, | | |
| | | [Homo sapiens] >pir\|JC4501\|JC4501 acidic calponin - | | | | | | | Pancreas, | | |
| | | human >sp\|Q15417\|Q15417 ACIDIC CALPONIN. | | | | | | | Colon, | | |
| | | Length = 329 | | | | | | | Breast/ | | |
| | | | | | | | | | Ovarian | | |
| 411 | 834861 | factor activating exoenzyme S [Bos taurus] | gi\|163042 | 74 | 967 | 99 | 99 | HBXFL41 | Lung, | | |
| | | >gi\|189953 phospholipase A2 [Homo sapiens] | | | | | | | Pancreas, | | |
| | | >gi\|899459 14-3-3 protein [Homo sapiens] | | | | | | | Prostate, | | |
| | | >pir\|A38246\|PSHUAM 14-3-3 protein zeta - human | | | | | | | Breast/ | | |
| | | >pir\|A47389\|A47389 14-3-3 protein zeta - bovine | | | | | | | Ovarian | | |
| | | >sp\|P29312\|143Z_HUMAN 14-3-3 PROT | | | | | | | | | |
| 412 | 834890 | TRANSCRIPTION FACTOR BTF3 (RNA | sp\|Q64152\| | 70 | 588 | 90 | 91 | H2CBT12 | Lung, | | |
| | | POLYMERASE B TRANSCRIPTION FACTOR 3). | BTF3_MOUSE | | | | | | Pancreas, | | |
| | | Length = 204 | | | | | | | Prostate | | |
| | | | | | | | | | Breast/ | | |
| | | | | | | | | | Ovarian | | |
| 413 | 835079 | | | 151 | 348 | | | HOELH62 | Lung, | | |
| | | | | | | | | | Pancreas, | | |
| | | | | | | | | | Breast/ | | |
| | | | | | | | | | Ovarian | | |
| 414 | 835554 | homologue to sec61 [Rattus rattus] Length = 476 | gi\|206886 | 121 | 1287 | 98 | 98 | HOHBH04 | Lung, | | |
| | | | | | | | | | Pancreas | | |
| 415 | 835560 | | | 2 | 574 | | | HE9NK60 | Lung, | | |
| | | | | | | | | | Pancreas | | |
| 416 | 835723 | immunoglobulin M heavy chain [Homo sapiens] | gi\|38406 | 48 | 1421 | 100 | 100 | HLYFY90 | Lung, | | |
| | | >gi\|3840S immunoglobulin M heavy chain [Homo | | | | | | | Pancreas, | | |
| | | sapiens] >pir\|S37768\|S37768 Ig mu chain C region - | | | | | | | Prostate, | | |
| | | human Length 453 | | | | | | | Colon, | | |
| | | | | | | | | | Breast/ | | |
| | | | | | | | | | Ovarian | | |
| 417 | 835791 | (AJ005890) JM1 [Homo sapiens] | gnl\|PID\|e1289743 | 437 | 1177 | 87 | 87 | HTXJH25 | Pancreas, | | |
| | | >sp\|O60826\|O60826 JM1 PROTEIN, COMPLETE | | | | | | | Breast/ | | |
| | | CDS (CLONE LLNLC110M0111Q7 (RZPD | | | | | | | Ovarian | | |
| | | BERLIN) AND LLNLC110K2140Q7 (RZPD | | | | | | | | | |
| | | BERLIN)). Length = 627 | | | | | | | | | |
| 418 | 835817 | | | 1369 | 1554 | | | HAJAZ17 | Lung, | | |
| | | | | | | | | | Breast/ | | |
| | | | | | | | | | Ovarian | | |
| 419 | 835840 | | | 2 | 730 | | | HHEOJ47 | Lung, | | |
| | | | | | | | | | Pancreas | | |
| 420 | 836048 | | | 2052 | 2276 | | | HDQDV21 | Lung, | | |
| | | | | | | | | | Prostate | | |
| 421 | 836898 | human P5 [Homo sapiens] >pir\|JC4369\|JC4369 P5 | gnl\|PID\|d1009061 | 3 | 1427 | 90 | 90 | HWHPA75 | Lung, | | |
| | | protein - human >sp\|Q15084\|ERP5_HUMAN | | | | | | | Pancreas, | | |
| | | PROBABLE PROTEIN DISULFIDE ISOMERASE | | | | | | | Colon, | | |
| | | P5 PRECURSOR (EC 5.3.4.1). Length = 440 | | | | | | | Breast/ | | |
| | | | | | | | | | Ovarian | | |
| 422 | 836927 | (AF027299) protein 4.1-G [Homo sapiens] | gi\|2739096 | 3 | 1196 | 84 | 84 | HDTKY58 | Lung, | | |
| | | >sp\|O43491\|O43491 PROTEIN 4.1-G. Length = | | | | | | | Pancreas | | |
| | | 1005 | | | | | | | | | |
| 423 | 837344 | S1R [Cowpox virus] >sp\|O72763\|O72763 S1R | gnl\|PID\|e1289272 | 38 | 658 | 48 | 58 | HLDAG32 | Lung, | | |
| | | PROTEIN. Length = 210 | | | | | | | Prostate | | |
| 424 | 837789 | bikunin [Homo sapiens] >sp\|O00271\|O00271 | gi\|2065529 | 365 | 1231 | 91 | 91 | HDABR73 | Colon, | | |
| | | BIKUNIN. Length = 252 | | | | | | | Breast/ | | |
| | | | | | | | | | Ovarian | | |
| 425 | 838549 | (AL023828) Y17G7B.14 [Caenorhabditis elegans] | gnl\|PID\|e1323274 | 2 | 853 | 42 | 55 | HDQDW56 | Lung, | | |
| | | >sp\|E1323274\|E1323274 Y17G7B.14 PROTEIN. | | | | | | | Breast/ | | |
| | | Length = 364 | | | | | | | Ovarian | | |
| 426 | 838754 | | | 437 | 1198 | | | HTEQK83 | Lung, | | |
| | | | | | | | | | Pancreas, | | |
| 427 | 838768 | | | 570 | 770 | | | HWBCW80 | Lung, | | |
| | | | | | | | | | Pancreas, | | |
| | | | | | | | | | Breast/ | | |
| | | | | | | | | | Ovarian | | |
| 428 | 839486 | fibronectin precursor [Homo sapiens] >gi\|4096846 | gi\|31397 | 2 | 493 | 98 | 98 | HSLGC71 | Lung, | | |
| | | fibronectin [Homo sapiens] {SUB 76-454} | | | | | | | Breast/ | | |
| | | >gi\|4096848 fibronectin [Homo sapiens] {SUB | | | | | | | Ovarian | | |
| | | 1892-2103} >gi\|182706 fibronectin [Homo sapiens] | | | | | | | | | |
| | | {SUB 1921-2040) >gi\|182684 fibronectin [Homo | | | | | | | | | |
| | | sapiens] {SUB 2233-2328} Len | | | | | | | | | |
| 429 | 839561 | p34 protein [Rattus sp.] >pir\|S36779\|S36779 | gnl\|PID\|d1003291 | 45 | 1133 | 86 | 88 | HUVFB27 | Lung, | | |
| | | ribosome-binding protein p34 - rat | | | | | | | Pancreas, | | |
| | | >sp\|Q63742\|Q63742 P34 PROTEIN. Length = 307 | | | | | | | Prostate | | |
| 430 | 839816 | similar to plasmodium merozite surface antigen | gi\|1293808 | 1 | 432 | 46 | 61 | HWADY11 | Lung, | | |
| | | precursor (SP:P04933) [Caenorhabditis elegans] | | | | | | | Breast/ | | |
| | | >sp\|Q22585\|Q22585 SIMILAR TO PLASMODIUM | | | | | | | Ovarian | | |
| | | MEROZITE SURFACE ANTIGEN PRECURSOR. | | | | | | | | | |
| | | Length = 634 | | | | | | | | | |
| 431 | 840068 | UMP-CMP kinase [Sus scrofa] >pir\|JC4181\|JC4181 | gnl\|PID\|d1006692 | 2 | 757 | 97 | 99 | HE8EH64 | Lung, | | |
| | | cytidylate kinaswe (EC 2.7.4.14) - pig | | | | | | | Pancreas, | | |
| | | >sp\|Q29561\|KCY_PIG UMP-CMP KINASE (EC | | | | | | | Breast/ | | |
| | | 2.7.4.14) (CYTIDYLATE KINASE) | | | | | | | Ovarian | | |
| | | (DEOXYCYTIDYLATE KINASE). Length = 196 | | | | | | | | | |
| 432 | 840279 | (AF062328) p120 catenin isoform 1AB [Homo | gi\|3152835 | 219 | 1493 | 93 | 93 | HSRBI81 | Lung, | | |
| | | sapiens] >sp\|O60715\|O60715 P120 CATENIN | | | | | | | Pancreas | | |
| | | ISOFORMS 1AB, 2AB, 3AB AND 4AB. | | | | | | | | | |
| | | >gi\|3152823 (AF062322) p120 catenin isoform 2AB | | | | | | | | | |
| | | [Homo sapiens] {SUB 55-962} >gi\|3152855 | | | | | | | | | |
| | | (AF062338) p120 catenin isoform 3AB [Homo | | | | | | | | | |
| | | sapiens] {S | | | | | | | | | |
| 433 | 840489 | connective tissue growth factor [Homo sapiens] | gi\|180924 | 1038 | 1370 | 100 | 100 | HOEMS29 | Lung, | | |
| | | >gi\|474934 connective tissue growth factor [Homo | | | | | | | Pancreas | | |
| | | sapiens] >pir\|A40551\|A40551 connective tissue | | | | | | | | | |
| | | growth factor - human >sp\|P29279\|CTGF_HUMAN | | | | | | | | | |
| | | CONNECTIVE TISSUE GROWTH FACTOR | | | | | | | | | |
| | | PRECURSOR. >gi\|984956 connective tiss | | | | | | | | | |
| 434 | 840538 | glycyl tRNA synthetase [Homo sapiens] | gnl\|PID\|d1006904 | 1 | 2298 | 100 | 100 | HYAAN81 | Lung, | | |
| | | >pir(A55314\|A55314 glycine-tRNA ligase (EC | | | | | | | Pancreas, | | |
| | | 6.1.1.14) precursor - human >gi\|600727 glycyl- | | | | | | | Prostate, | | |
| | | tRNA synthetase [Homo sapiens] {SUB 55-739} | | | | | | | Breast/ | | |
| | | >gi\|3845409 (AC004976) glycyl tRNA synthetase | | | | | | | Ovarian | | |
| | | [Homo sapiens] {SUB 348-739} Length = | | | | | | | | | |
| 435 | 840545 | | | 145 | 1302 | | | HMCFK75 | Lung, | | |
| | | | | | | | | | Pancreas, | | |
| | | | | | | | | | Colon, | | |
| | | | | | | | | | Breast/ | | |
| | | | | | | | | | Ovarian | | |
| 436 | 840549 | | | 1 | 492 | | | HWHGB33 | Lung, | | |
| | | | | | | | | | Prostate | | |
| 437 | 840551 | IgG Fc binding protein [Homo sapiens] Length = | gnl\|PID\|d1020288 | 3 | 1409 | 93 | 93 | HWLKM77 | Lung, | | |
| | | 5405 | | | | | | | Prostate, | | |
| | | | | | | | | | Colon | | |
| 438 | 840557 | | | 346 | 1014 | | | H6ED519 | Prostate, | | |
| | | | | | | | | | Colon | | |
| 439 | 840561 | putative [Mus musculus] >pir\|S15785\|S15785 heat- | gi\|51442 | 385 | 495 | 48 | 72 | HLIBZ07 | Lung, | | |
| | | stable antigen-related hypothetical protein HSA-C - | | | | | | | Pancreas, | | |
| | | mouse >sp\|Q61692\|Q61692 HSA-C GENE | | | | | | | Prostate, | | |
| | | CODING FOR HEAT STABLE ANTIGEN. Length = | | | | | | | Colon, | | |
| | | 141 | | | | | | | Breast/ | | |
| | | | | | | | | | Ovarian | | |
| 440 | 840562 | (AB008549) type 1 procollagen C-proteinase | gi\|2589011 | 103 | 1476 | 96 | 96 | HSSD165 | Lung, | | |
| | | enhancer protein [Homo sapiens] >gi\|3135316 | | | | | | | Pancreas, | | |
| | | (AF053356) PCOLCE [Homo sapiens] | | | | | | | Prostate, | | |
| | | >sp\|O14550\|O14550 TYPE 1 PROCOLLAGEN C- | | | | | | | Colon | | |
| | | PROTEINASE ENHANCER PROTEIN. Length = | | | | | | | | | |
| | | 449 | | | | | | | | | |
| 441 | 840564 | PQ-rich protein [Homo sapiens] >pir\|S58222\|S58222 | gi\|929660 | 2 | 688 | 67 | 68 | HPJDB01 | Lung, | | |
| | | PQ-rich protein - human >sp\|Q15184\|Q15184 PQ- | | | | | | | Pancreas | | |
| | | RICH PROTEIN. Length = 400 | | | | | | | | | |
| 442 | 840572 | putative [Homo sapiens] >pir\|I54339\|I54339 prot- | gi\|291873 | 3 | 1172 | 95 | 95 | HTGAZ34 | Prostate, | | |
| | | oncogene - human >sp\|P35226\|BMI1_HUMAN | | | | | | | Colon | | |
| | | DNA-BINDING PROTEIN BMI-1. Length = 326 | | | | | | | | | |
| 443 | 840600 | | | 3 | 119 | | | HYABI30 | Prostate, | | |
| | | | | | | | | | Breast/ | | |
| | | | | | | | | | Ovarian | | |
| 444 | 840604 | Similarity to Mouse A-RAF proto-oncogene | gnl\|PID\|e1344589 | 1 | 1359 | 82 | 87 | HWLHN58 | Lung, | | |
| | | serine/threonine-protein kinase | | | | | | | Pancreas, | | |
| | | (SW:KRAA_MOUSE); | | | | | | | Prostate, | | |
| | | | | | | | | | Breast/ | | |
| | | | | | | | | | Ovarian | | |
| 445 | 840608 | olfactomedin [Rana catesbeiana] | gi\|294502 | 200 | 1549 | 55 | 75 | HWLFY46 | Pancreas, | | |
| | | >pir\|A47442\|A47442 olfactomedin precursor - | | | | | | | Colon | | |
| | | bullfrog >sp\|Q07081\|OLFM_RANCA | | | | | | | | | |
| | | OLFACTOMEDIN PRECURSOR (OLFACTORY | | | | | | | | | |
| | | MUCUS PROTEIN). Length = 464 | | | | | | | | | |
| 446 | 840620 | | | 776 | 1267 | | | HTXGB37 | Lung, | | |
| | | | | | | | | | Prostate | | |
| 447 | 840625 | | | 138 | 257 | | | HTXDT74 | Lung, | | |
| | | | | | | | | | Prostate | | |
| 448 | 840626 | nicotinamide N-methyltransferase [Homo sapiens] | gi\|494989 | 485 | 1282 | 100 | 100 | HULAS90 | Lung, | | |
| | | >gi\|1063610 nicotinamide N-methyltransferase | | | | | | | Pancreas, | | |
| | | [Homo sapiens] >pir\|A54060\|A54060 nicotinamide | | | | | | | Prostate, | | |
| | | N-methyltransferase (EC 2.1.1.1) - human | | | | | | | Colon, | | |
| | | >sp\|P40261\|NNMT_HUMAN NICOTINAMIDE N- | | | | | | | Breast/ | | |
| | | METHYLTRANSFERASE (EC 2.1.1.1). Lengt | | | | | | | Ovarian | | |
| 449 | 840638 | | | 16 | 351 | | | HTTDV02 | Prostate, | | |
| | | | | | | | | | Breast/ | | |
| | | | | | | | | | Ovarian | | |
| 450 | 840649 | BL34 = B cell activation gene [human, Peptide, 196 | bbs\|129951 | 1 | 651 | 100 | 100 | HTWCY84 | Lung, | | |
| | | aa] [Homo sapiens] >pir\|I56165\|I56165 B cell | | | | | | | Prostate | | |
| | | activation protein BL34 - human Length = 196 | | | | | | | | | |
| 451 | 840651 | | | 2 | 706 | | | HTTAD76 | Pancreas, | | |
| | | | | | | | | | Prostate | | |
| 452 | 840666 | | | 2 | 826 | | | HTOAF86 | Lung, | | |
| | | | | | | | | | Prostate | | |
| 453 | 840681 | | | 157 | 2187 | | | HTAER63 | Lung, | | |
| | | | | | | | | | Prostate | | |
| 454 | 840682 | siah binding protein 1 [Homo sapiens] | gi\|1809248 | 1 | 1734 | 99 | 99 | HE9PW64 | Lung, | | |
| | | >sp\|Q99628\|Q99628 SIAH BINDING PROTEIN 1 | | | | | | | Breast/ | | |
| | | (FRAGMENT). Length 541 | | | | | | | Ovarian | | |
| 455 | 840684 | | | 3 | 539 | | | HTGBT14 | Pancreas, | | |
| | | | | | | | | | Prostate, | | |
| | | | | | | | | | Breast/ | | |
| | | | | | | | | | Ovarian | | |
| 456 | 840697 | | | 96 | 560 | | | HTECA52 | Lung, | | |
| | | | | | | | | | Prostate | | |
| 457 | 840698 | t-complex-type molecular chaperone TCP1 - human | pir\|S10486\| | 507 | 1853 | 96 | 97 | HDABW50 | Pancreas, | | |
| | | >gi\|339211 t-complex 1 protein [Homo sapiens] | S10486 | | | | | | Prostate | | |
| | | {SUB 308-365} Length = 556 | | | | | | | | | |
| 458 | 840708 | | | 1200 | 1487 | | | HTEAF73 | Lung, | | |
| | | | | | | | | | Prostate | | |
| 459 | 840714 | (AF053304) mitotic checkpoint component Bub3 | gi\|2981231 | 175 | 1170 | 100 | 100 | HTEGU90 | Lung, | | |
| | | [Homo sapiens] >gi\|2921873 (AF047472) spleen | | | | | | | Pancreas, | | |
| | | mitotic checkpoint BUB3 [Homo sapiens] | | | | | | | Prostate, | | |
| | | >gi\|3639060 (AF081496) kinetochore protein BUB3 | | | | | | | Breast/ | | |
| | | [Homo sapiens] >sp\|O43684\|O43684 SPLEEN | | | | | | | Ovarian | | |
| | | MITOTIC CHECKPOINT BUB3. Length = 328 | | | | | | | | | |
| 460 | 840716 | (AC005326) asparagine synthetase [Homo sapiens] | gi\|3341715 | 166 | 1860 | 94 | 94 | HSYAJ64 | Lung, | | |
| | | >sp\|G3341715\|G3341715 ASPARAGINE | | | | | | | Prostate, | | |
| | | SYNTHETASE. >gi\|703119 asparagine synthetase | | | | | | | Colon, | | |
| | | [Homo sapiens] {SUB 1-83} Length = 561 | | | | | | | Breast/ | | |
| | | | | | | | | | Ovarian | | |
| 461 | 840721 | | | 2 | 1324 | | | HSUSE92 | Lung, | | |
| | | | | | | | | | Pancreas, | | |
| | | | | | | | | | Prostate, | | |
| | | | | | | | | | Colon | | |
| 462 | 840735 | (AC002425) Gene product with similarity to Rat P8 | gi\|2947054 | 111 | 392 | 64 | 64 | HSRDN44 | Lung, | | |
| | | [Homo sapiens] >gi\|3202004 (AF069073) P8 protein | | | | | | | Pancreas, | | |
| | | [Homo sapiens] >gi\|3202006 (AF069074) P8 protein | | | | | | | Prostate, | | |
| | | [Homo sapiens] >sp\|O60356\|O60356 GENE | | | | | | | Breast/ | | |
| | | PRODUCT WITH SIMILARITY TO RAT P8. | | | | | | | Ovarian | | |
| | | Length = 82 | | | | | | | | | |
| 463 | 840738 | | | 985 | 1230 | | | HTOJK11 | Prostate, | | |
| | | | | | | | | | Colon | | |
| 464 | 840745 | 52-kD SS-A/Ro autoantigen [Homo sapiens] | gi\|338490 | 2 | 694 | 46 | 63 | HSSGC06 | Lung, | | |
| | | Length = 475 | | | | | | | Prostate, | | |
| | | | | | | | | | Colon | | |
| 465 | 840747 | (AC004522) Zn-alpha2-glycoprotein [Homo sapiens] | gi\|3006228 | 368 | 877 | 95 | 95 | HLDOL02 | Lung, | | |
| | | >sp\|O60386\|O60386 ZN-ALPHA2- | | | | | | | Pancreas, | | |
| | | GLYCOPROTEIN. Length = 334 | | | | | | | Breast/ | | |
| | | | | | | | | | Ovarian | | |
| 466 | 840756 | (AB005624) rig-analog DNA-binding protein [Sus | gnl\|PID\|d1022359 | 148 | 480 | 97 | 97 | HCHBQ33 | Lung, | | |
| | | scrofa] >gi\|306898 rig-analog protein (putative); | | | | | | | Pancreas, | | |
| | | putative [Homo sapiens] >gi\|337416 human | | | | | | | Colon, | | |
| | | homologue of rat insulinoma gene (rig); putative | | | | | | | Breast/ | | |
| | | [Homo sapiens] >gi\|305361 Rig DNA-binding | | | | | | | Ovarian | | |
| | | protein (putative); putati | | | | | | | | | |
| 467 | 840776 | Notch3 [Homo sapiens] >sp\|G2668592\|G2668592 | gi\|2668592 | 2 | 364 | 82 | 82 | HSKJZ22 | Lung, | | |
| | | NOTCH3. Length = 2321 | | | | | | | Breast/ | | |
| | | | | | | | | | Ovarian | | |
| 468 | 840784 | aldehyde dehydrogenase 6 [Homo sapiens] | gi\|544482 | 1 | 618 | 94 | 95 | HSKAC75 | Lung, | | |
| | | >pir\|A55684\|A55684 aldehyde dehydrogenase | | | | | | | Prostate, | | |
| | | (NAD+) (EC 1.2.1.3) 6 precursor, salivary - human | | | | | | | Colon, | | |
| | | >sp\|P47895\|DHA6_HUMAN ALDEHYDE | | | | | | | Breast/ | | |
| | | DEHYDROGENASE 6 (EC 1.2.1.5). Length = 512 | | | | | | | Ovarian | | |
| 469 | 840788 | P1 gene for c subunit of human mitochondrial ATP | gi\|38430 | 59 | 484 | 85 | 85 | HHFUM32 | Lung, | | |
| | | synthase gene product [Homo sapiens] | | | | | | | Prostate, | | |
| | | >gnl\|PID\|d1002920 ATP synthase subunit c | | | | | | | Colon, | | |
| | | precursor [Homo sapiens] >pir\|534066\|534066 H+- | | | | | | | Breast/ | | |
| | | transporting ATP synthase (EC 3.6.1.34) lipid- | | | | | | | Ovarian | | |
| | | binding protein P1 precursor, mitoc | | | | | | | | | |
| 470 | 840794 | | | 162 | 1646 | | | HOHBT28 | Lung, | | |
| | | | | | | | | | Pancreas, | | |
| | | | | | | | | | Prostate, | | |
| | | | | | | | | | Colon | | |
| 471 | 840797 | OSF-2p1 [Homo sapiens] >pir\|S36111\|S36111 | gnl\|PID\|d1003341 | 2 | 2371 | 93 | 93 | HDTIM52 | Pancreas, | | |
| | | osteoblast-specific factor 2 - human | | | | | | | Breast/ | | |
| | | >sp\|Q15064\|Q15064 OSF-2P1. Length = 779 | | | | | | | Ovarian | | |
| 472 | 840799 | | | 292 | 510 | | | HWBCI48 | Lung, | | |
| | | | | | | | | | Pancreas, | | |
| | | | | | | | | | Colon, | | |
| | | | | | | | | | Breast/ | | |
| | | | | | | | | | Ovarian | | |
| 473 | 840818 | translational initiation factor eIF-2, alpha subunit | gi\|181995 | 3 | 806 | 100 | 100 | HHBHM68 | Lung, | | |
| | | [Homo sapiens] >sp\|P05198\|IF2A_HUMAN | | | | | | | Prostate | | |
| | | EUKARYOTIC TRANSLATION INITIATION | | | | | | | | | |
| | | FACTOR 2 ALPHA SUBUNIT (EIF-2-ALPHA). | | | | | | | | | |
| | | {SUB 2-315} Length = 315 | | | | | | | | | |
| 474 | 840822 | fatty acid synthase [Homo sapiens] | gi\|915392 | 1423 | 2367 | 93 | 93 | HGBHX28 | Lung, | | |
| | | >pir\|G01880\|G01880 fatty-acid synthase (EC | | | | | | | Prostate, | | |
| | | 2.3,1.85) - human >sp\|Q16702\|Q16702 FATTY | | | | | | | Colon, | | |
| | | ACID SYNTHASE (EC 2.3.1.85) (FATTY-ACID | | | | | | | Breast/ | | |
| | | SYNTHASE). Length = 2509 | | | | | | | Ovarian | | |
| 475 | 840830 | diubiquitin [Homo sapiens] >sp\|O15205\|O15205 | gnl\|PID\|e321293 | 1 | 573 | 99 | 99 | HFXHP85 | Pancreas, | | |
| | | DIUBIQUITIN. Length = 165 | | | | | | | Prostate | | |
| 476 | 840846 | glutathione 5-transferase Ha subunit 1 (EC 2.5.1.18) | gi\|306810 | 144 | 833 | 95 | 95 | HFVHP57 | Prostate, | | |
| | | [Homo sapiens] >gi\|306815 glutathione S- | | | | | | | Breast/ | | |
| | | transferase (GST, EC 2.5.1.18) [Homo sapiens] | | | | | | | Ovarian | | |
| | | >gi\|306809 glutathione S-transferase [Homo sapiens] | | | | | | | | | |
| | | >bbs\|76373 glutathione S-transferase Ha1 subunit | | | | | | | | | |
| | | {EC 2.5.1.18} [ | | | | | | | | | |
| 477 | 840848 | prohibitin [human, Peptide, 272 aa] [Homo sapiens] | bbs\|85658 | 81 | 917 | 93 | 93 | HHBHM75 | Lung, | | |
| | | >pir\|I52690\|I52690 prohibitin - human | | | | | | | Pancreas, | | |
| | | >sp\|P35232\|PHB_HUMAN PROHIBITIN. | | | | | | | Prostate, | | |
| | | Length = 272 | | | | | | | Breast/ | | |
| | | | | | | | | | Ovarian | | |
| 478 | 840860 | NAP [Homo sapiens] >pir\|S40510\|S40510 | gi\|189067 | 92 | 1309 | 80 | 80 | HDTLJ39 | Lung, | | |
| | | nucleosome assembly protein 1-like 1 - human | | | | | | | Pancreas, | | |
| | | >sp\|P55209\|NPL1_HUMAN NUCLEOSOME | | | | | | | Colon, | | |
| | | ASSEMBLY PROTEIN 1-LIKE 1 (NAP-1 | | | | | | | Breast/ | | |
| | | RELATED PROTEIN). Length = 391 | | | | | | | Ovarian | | |
| 479 | 840861 | (AL021546) Cytochrome C Oxidase Polypeptide | gnl\|PID\|e1248288 | 2 | 520 | 100 | 100 | HFPBO29 | Lung, | | |
| | | VIa-liver precursor (EC 1.9.3.1) [Homo sapiens] | | | | | | | Prostate, | | |
| | | >sp\|O43714\|O43714 CYTOCHROME C OXIDASE | | | | | | | Breast/ | | |
| | | POLYPEPTIDE VIA-LIVER PRECURSOR (EC | | | | | | | Ovarian | | |
| | | 1.9.3.1) (CYTOCHROME-C OXIDASE) | | | | | | | | | |
| | | (CYTOCHROME OXIDASE) (CYTOCHROME | | | | | | | | | |
| | | A(3)) (CYTOCHROME AA(3) | | | | | | | | | |
| 480 | 840871 | DNA polymerase delta small subunit [Homo | gi\|1008458 | 2 | 628 | 99 | 99 | HSDJX61 | Pancreas, | | |
| | | sapiens] >pir\|I38950\|I38950 DNA-directed DNA | | | | | | | Colon, | | |
| | | polymerase (EC 2.7.7.7) delta regulatory chain - | | | | | | | Breast/ | | |
| | | human >sp\|P49005\|DPD2_HUMAN DNA | | | | | | | Ovarian | | |
| | | POLYMERASE DELTA SMALL SUBUNIT (EC | | | | | | | | | |
| | | 2.7.7.7). Length = 469 | | | | | | | | | |
| 481 | 840874 | secreted cyclophilin-like protein [Homo sapiens] | gi\|337999 | 1 | 873 | 94 | 94 | HFTDK64 | Lung, | | |
| | | >gi\|181335 cyclophilin B [Homo sapiens] {SUB 9- | | | | | | | Prostate | | |
| | | 216} >gi\|181250 cyclophilin [Homo sapiens] {SUB | | | | | | | | | |
| | | 10-216} Length = 216 | | | | | | | | | |
| 482 | 840878 | unknown [Homo sapiens] | gnl\|PID\|d1006216 | 227 | 676 | 99 | 100 | H2MBT19 | Lung, | | |
| | | >sp\|P41271\|DAN_HUMAN ZINC FINGER | | | | | | | Pancreas, | | |
| | | PROTEIN DAN (N03). Length = 180 | | | | | | | Colon, | | |
| | | | | | | | | | Breast/ | | |
| | | | | | | | | | Ovarian | | |
| 483 | 840880 | | | 153 | 320 | | | HFIXK16 | Prostate, | | |
| | | | | | | | | | Colon, | | |
| | | | | | | | | | Breast/ | | |
| | | | | | | | | | Ovarian | | |
| 484 | 840884 | mutY homolog [Homo sapiens] >sp\|Q15830\|Q15830 | gi\|1458228 | 108 | 1565 | 99 | 99 | HIBCH18 | Lung, | | |
| | | MUTY HOMOLOG. Length = 535 | | | | | | | Prostate | | |
| 485 | 840907 | | | 103 | 366 | | | HETAD58 | Pancreas, | | |
| | | | | | | | | | Prostate | | |
| 486 | 840926 | | | 76 | 1347 | | | HEOMT66 | Lung, | | |
| | | | | | | | | | Pancreas, | | |
| | | | | | | | | | Prostate | | |
| 487 | 840932 | ATP synthase beta subunit precursor [Homo | gi\|179281 | 2 | 1675 | 93 | 93 | HFIBB89 | Lung, | | |
| | | sapiens] >pir\|A33370\|A33370 H+-transporting ATP | | | | | | | Prostate | | |
| | | synthase (EC 3.6.1.34) beta chain precursor, | | | | | | | | | |
| | | mitochondrial - human >sp\|P06576\| | | | | | | | | | |
| | | ATPB_HUMAN ATP SYNTHASE BETA CHAIN, | | | | | | | | | |
| | | MITOCHONDRIAL PRECURSOR (EC 3.6.1.34). | | | | | | | | | |
| | | >gi\|28931 be | | | | | | | | | |
| 488 | 840940 | carbonyl reductase [Sus scrofa] >pir\|JN0703\|JN0703 | gnl\|PID\|d1004479 | 277 | 678 | 61 | 76 | HCHNJ32 | Pancreas, | | |
| | | carbonyl reductase (NADPH) (EC 1.1.1.184) - pig | | | | | | | Breast/ | | |
| | | >sp\|Q29529\|CBR2_PIG LUNG CARBONYL | | | | | | | Ovarian | | |
| | | REDUCTASE [NADPH] (EC 1.1.1.184) (NADPH- | | | | | | | | | |
| | | DEPENDENT CARBONYL REDUCTASE) (LCR). | | | | | | | | | |
| | | Length = 244 | | | | | | | | | |
| 489 | 840947 | | | 2 | 565 | | | HEGAN45 | Lung, | | |
| | | | | | | | | | Pancreas, | | |
| | | | | | | | | | Prostate, | | |
| | | | | | | | | | Breast/ | | |
| | | | | | | | | | Ovarian | | |
| 490 | 840959 | signal peptidase complex 25 kDa subunit [Canis | gi\|533111 | 2 | 712 | 99 | 99 | HEDAD53 | Lung, | | |
| | | familiaris] >pir\|A55012\|A55012 signal peptidase | | | | | | | Pancreas, | | |
| | | 25k chain - dog Length = 226 | | | | | | | Prostate, | | |
| | | | | | | | | | Breast/ | | |
| | | | | | | | | | Ovarian | | |
| 491 | 840964 | | | 177 | 344 | | | HE8UK92 | Prostate, | | |
| | | | | | | | | | Colon | | |
| 492 | 840979 | transcription factor-like protein 4-human Length = | pir\|JC5333\| | 11 | 631 | 99 | 100 | HE9HD45 | Lung, | | |
| | | 298 | JC5333 | | | | | | Pancreas, | | |
| | | | | | | | | | Breast/ | | |
| | | | | | | | | | Ovarian | | |
| 493 | 840984 | p167 [Homo sapiens] >gnl\|PID\|d1010130 The | gi\|1808985 | 3 | 3017 | 91 | 91 | HE8OC40 | Lung, | | |
| | | KIAA0139 gene product is related to mouse | | | | | | | Pancreas, | | |
| | | centrosomin B. [Homo sapiens] >gi\|2501783 | | | | | | | Prostate, | | |
| | | translation initiation factor 3 large subunit [Homo | | | | | | | Breast/ | | |
| | | sapiens] >sp\|Q14152\|Q14152 KIAA0139 | | | | | | | Ovarian | | |
| | | PROTEIN. >gi\|1399801 p167 [Homo sapiens] | | | | | | | | | |
| 494 | 840986 | | | 1 | 693 | | | HE8TB60 | Pancreas, | | |
| | | | | | | | | | Prostate, | | |
| | | | | | | | | | Colon | | |
| 495 | 840988 | | | 1 | 465 | | | HE8QQ04 | Pancreas, | | |
| | | | | | | | | | Prostate, | | |
| | | | | | | | | | Breast/ | | |
| | | | | | | | | | Ovarian | | |
| 496 | 840990 | (AB010415) dTDP-4-keto-L-rhamnose reductase | gnl\|PID\|d1029073 | 157 | 1140 | 32 | 59 | HE8AM92 | Pancreas, | | |
| | | [Actinobacillus actinomycetemcomitans] | | | | | | | Prostate | | |
| | | >sp\|O66251\|O66251 DTDP-4-KETO-L- | | | | | | | | | |
| | | RHAMNOSE REDUCTASE. Length = 294 | | | | | | | | | |
| 497 | 840992 | nidogen gene product [Homo sapiens] Length = | gnl\|PID\|e218221 | 3 | 194 | 96 | 98 | HE8BX38 | Lung, | | |
| | | 1246 | | | | | | | Prostate, | | |
| | | | | | | | | | Colon, | | |
| | | | | | | | | | Breast/ | | |
| | | | | | | | | | Ovarian | | |
| 498 | 841009 | sin3 associated polypeptide p18 [Homo sapiens] | gi\|2108210 | 59 | 523 | 92 | 92 | HDTGP88 | Lung, | | |
| | | >sp\|O00422\|O00422 SIN3 ASSOCIATED | | | | | | | Pancreas, | | |
| | | POLYPEPTIDE P18. Length = 153 | | | | | | | Prostate, | | |
| | | | | | | | | | Colon, | | |
| | | | | | | | | | Breast/ | | |
| | | | | | | | | | Ovarian | | |
| 499 | 841012 | ribosomal protein L39 [Homo sapiens] | gi\|1373419 | 2 | 217 | 100 | 100 | HSKXP01 | Lung, | | |
| | | >gnl\|PID\|d1012131 ribosomal protein L39 [Homo | | | | | | | Pancreas, | | |
| | | sapiens] >gi\|575382 ribosomal protein L39 [Rattus | | | | | | | Breast/ | | |
| | | norvegicus] >pir\|JC4229\|R6RT39 ribosomal protein | | | | | | | Ovarian | | |
| | | L39 - rat >pir\|G02654\|G02654 ribosomal protein | | | | | | | | | |
| | | L39 - human Length = 51 | | | | | | | | | |
| 500 | 841016 | connexin 43 [Homo sapiens] >gi\|29917 gap junction | gi\|181209 | 1 | 810 | 94 | 94 | HDTDH13 | Lung, | | |
| | | protein (AA 1-382) [Homo sapiens] | | | | | | | Pancreas, | | |
| | | >pir\|A35853\|A35853 gap junction protein Cx43, | | | | | | | Prostate, | | |
| | | cardiac - human >sp\|P17302\|CXA1_HUMAN GAP | | | | | | | Colon | | |
| | | JUNCTION ALPHA-1 PROTEIN (CONNEXIN 43) | | | | | | | | | |
| | | (CX43) (GAP JUNCTION 43 KD HEART | | | | | | | | | |
| | | PROTEIN). { | | | | | | | | | |
| 501 | 841017 | | | 402 | 683 | | | HE2AY01 | Lung, | | |
| | | | | | | | | | Prostate | | |
| 502 | 841021 | | | 983 | 1357 | | | HNAAE75 | Lung, | | |
| | | | | | | | | | Pancreas, | | |
| | | | | | | | | | Colon, | | |
| | | | | | | | | | Breast/ | | |
| | | | | | | | | | Ovarian | | |
| 503 | 841032 | (AB000910) ribosomal protein [Sus scrofa] | gnl\|PID\|d1019960 | 3 | 395 | 100 | 100 | HDQAD36 | Lung, | | |
| | | >gi\|1684917 L44-like ribosomal protein [Homo | | | | | | | Colon | | |
| | | sapiens] >gi\|1666702 ribosomal protein [Mus | | | | | | | | | |
| | | musculus] >gi\|206732 ribosomal protein L36a | | | | | | | | | |
| | | [Rattus norvegicus] >pir\|A29820\|R6RT36 ribosomal | | | | | | | | | |
| | | protein L36a - rat Length = 106 | | | | | | | | | |
| 504 | 841051 | | | 656 | 880 | | | HDPDC65 | Lung, | | |
| | | | | | | | | | Pancreas | | |
| 505 | 841064 | small subunit ribonucleotide reductase [Homo | gi\|36155 | 6 | 1244 | 96 | 96 | HDPMF32 | Prostate, | | |
| | | sapiens] >pir\|S25854\|S25854 ribonucleoside- | | | | | | | Colon, | | |
| | | diphosphate reductase (EC 1.17.4.1) small chain - | | | | | | | Breast/ | | |
| | | human Length = 389 | | | | | | | Ovarian | | |
| 506 | 841069 | | | 81 | 809 | | | HDPMJ48 | Prostate, | | |
| | | | | | | | | | Breast/ | | |
| | | | | | | | | | Ovarian | | |
| 507 | 841072 | regulatory protein [Mus musculus] >gi\|452276 | gi\|456107 | 162 | 1139 | 91 | 95 | HDPGF81 | Lung, | | |
| | | npdcf-1 [Mus musculus] >pir\|I48691\|I48691 | | | | | | | Prostate, | | |
| | | regulatory protein - mouse | | | | | | | Colon, | | |
| | | >sp\|Q64322\|NPDI_MOUSE NPDC-1 PROTEIN | | | | | | | Breast/ | | |
| | | PRECURSOR. Length = 332 | | | | | | | Ovarian | | |
| 508 | 841078 | | | 521 | 706 | | | HDPKD92 | Pancreas, | | |
| | | | | | | | | | Prostate | | |
| 509 | 841080 | HCNGP gene product [Mus musculus] | gi\|57912 | 1 | 936 | 88 | 88 | HDPJR07 | Prostate, | | |
| | | >pir\|S26660\|S26660 HCNGP protein - mouse | | | | | | | Breast/ | | |
| | | >sp\|Q02614\|HCGP_MOUSE TRANSCRIPTIONAL | | | | | | | Ovarian | | |
| | | REGULATOR PROTEIN HCNGP. Length = 308 | | | | | | | | | |
| 510 | 841088 | quinone oxidoreductase [Homo sapiens] >gi\|516534 | gi\|190818 | 320 | 1096 | 100 | 100 | HDPFX64 | Lung, | | |
| | | quinone oxidoreductase2 [Homo sapiens] | | | | | | | Pancreas, | | |
| | | >pir\|A32667\|A32667 NAD(P)H dehydrogenase | | | | | | | Prostate, | | |
| | | (quinone) (EC 1.6.99.2) 2 - human Length = 231 | | | | | | | Breast/ | | |
| | | | | | | | | | Ovarian | | |
| 511 | 841092 | | | 1187 | 1402 | | | HJMBH15 | Lung, | | |
| | | | | | | | | | Colon | | |
| 512 | 841095 | L protein (AA 1-558) [Homo sapiens] | gi\|32356 | 2 | 904 | 84 | 84 | H2LAT51 | Lung, | | |
| | | >pir\|A33616\|A33616 heterogeneous ribonuclear | | | | | | | Pancreas, | | |
| | | particle protein L - human Length = 558 | | | | | | | Colon, | | |
| | | | | | | | | | Breast/ | | |
| | | | | | | | | | Ovarian | | |
| 513 | 841096 | (AB013357) 49 kDa zinc finger protein [Mus | gnl\|PID\|d1038083 | 510 | 1907 | 80 | 80 | HCFLJ15 | Lung, | | |
| | | musculus] Length = 460 | | | | | | | Pancreas, | | |
| | | | | | | | | | Breast/ | | |
| | | | | | | | | | Ovarian | | |
| 514 | 841102 | | | 2 | 256 | | | HDLAV12 | Lung, | | |
| | | | | | | | | | Pancreas, | | |
| | | | | | | | | | Prostate, | | |
| | | | | | | | | | Breast/ | | |
| | | | | | | | | | Ovarian | | |
| 515 | 841104 | zinc finger protein [Homo sapiens] | gi\|186774 | 712 | 2451 | 54 | 70 | HDLAB16 | Pancreas, | | |
| | | >pir\|S35305\|S35305 finger protein ZNF91 - human | | | | | | | Prostate, | | |
| | | Length = 1191 | | | | | | | Breast/ | | |
| | | | | | | | | | Ovarian | | |
| 516 | 841108 | factor XIII a subunit [Homo sapiens] Length = 732 | gi\|182309 | 3 | 1838 | 99 | 99 | HDPFE82 | Lung, | | |
| | | | | | | | | | Pancreas, | | |
| | | | | | | | | | Colon | | |
| 517 | 841118 | | | 320 | 487 | | | HDLAE34 | Lung, | | |
| | | | | | | | | | Pancreas, | | |
| | | | | | | | | | Prostate | | |
| 518 | 841119 | C11 protein [Homo sapiens] >gi\|1890300 eukaryotic | gnl\|PID\|e118910 | 123 | 1367 | 100 | 100 | HDPAE95 | Lung, | | |
| | | release factor 1 [Homo sapiens] >gnl\|PID\|e1118068 | | | | | | | Pancreas, | | |
| | | C11 protein [Mesocricetus auratus] | | | | | | | Prostate | | |
| | | >pir\|S50853\|S50853 translation releasing factor | | | | | | | | | |
| | | eRF-1 - human >sp\|P46055\|ERF1_HUMAN | | | | | | | | | |
| | | EUKARYOTIC PEPTIDE CHAIN RELEASE | | | | | | | | | |
| | | FACT | | | | | | | | | |
| 519 | 841124 | similar to deoxyribose-phosphate aldolase | gi\|1019952 | 2 | 358 | 62 | 80 | HDAAB17 | Prostate, | | |
| | | [Caenorhabditis elegans] | | | | | | | Colon | | |
| | | >sp\|Q19264\|DEOC_CAEEL PUTATIVE | | | | | | | | | |
| | | DEOXYRIBOSE-PHOSPHATE ALDOLASE (EC | | | | | | | | | |
| | | 4.1.2.4) (PHOSPHODEOXYRIBOALDOLASE) | | | | | | | | | |
| | | (DEOXYRIBOALDOLASE). Length = 303 | | | | | | | | | |
| 520 | 841137 | (AF096285) serine-threonine kinase receptor- | gi\|4063383 | 3 | 848 | 98 | 99 | HDAAP84 | Lung, | | |
| | | associated protein [Mus musculus] | | | | | | | Pancreas, | | |
| | | >sp\|G4063383\|G4063383 SERINE-THREONINE | | | | | | | Prostate, | | |
| | | KINASE RECEPTOR-ASSOCIATED PROTEIN. | | | | | | | Breast/ | | |
| | | Length = 351 | | | | | | | Ovarian | | |
| 521 | 841143 | fibrillarin [Homo sapiens] >pir\|A38712\|A38712 | gi\|31395 | 39 | 1040 | 100 | 100 | HCRMJ87 | Pancreas, | | |
| | | fibrillarin - human >gi\|3399667 (AC005393) | | | | | | | Prostate, | | |
| | | FBRL_HUMAN; 34 KD NUCLEOLAR | | | | | | | Breast/ | | |
| | | SCLERODERMA ANTIGEN [Homo sapiens] | | | | | | | Ovarian | | |
| | | {SUB 4-321} Length = 321 | | | | | | | | | |
| 522 | 841148 | | | 2 | 1807 | | | HCRNF38 | Lung, | | |
| | | | | | | | | | Pancreas, | | |
| | | | | | | | | | Prostate, | | |
| | | | | | | | | | Colon, | | |
| | | | | | | | | | Breast/ | | |
| | | | | | | | | | Ovarian | | |
| 523 | 841149 | | | 324 | 797 | | | HCRBS04 | Prostate, | | |
| | | | | | | | | | Breast/ | | |
| | | | | | | | | | Ovarian | | |
| 524 | 841151 | keratin [Carassius auratus] Length = 455 | gi\|212995 | 2 | 1399 | 45 | 64 | HCRNY54 | Lung, | | |
| | | | | | | | | | Pancreas, | | |
| | | | | | | | | | Prostate, | | |
| | | | | | | | | | Colon, | | |
| | | | | | | | | | Breast/ | | |
| | | | | | | | | | Ovarian | | |
| 525 | 841155 | | | 103 | 561 | | | HCHOF85 | Prostate, | | |
| | | | | | | | | | Breast/ | | |
| | | | | | | | | | Ovarian | | |
| 526 | 841161 | (AB014458) ubiquitin specific protease [Homo | gnl\|PID\|d1035685 | 3 | 1199 | 95 | 95 | HCLCA56 | Lung, | | |
| | | sapiens] >sp\|D1035685\|D1035685 UBIQUITIN | | | | | | | Prostate | | |
| | | SPECIFIC PROTEASE. Length = 785 | | | | | | | | | |
| 527 | 841162 | set [Homo sapiens] >pir\|A57984\|A45018 template | gi\|338039 | 284 | 1063 | 99 | 100 | HCWFR92 | Prostate, | | |
| | | activating factor-I, splice form beta - human | | | | | | | Colon | | |
| | | Length = 277 | | | | | | | | | |
| 528 | 841163 | histone H2A [Mus musculus domesticus] | gi\|817939 | 201 | 665 | 100 | 100 | HBMBF44 | Pancreas, | | |
| | | >pir\|S45110\|S45110 histone H2A - mouse | | | | | | | Breast/ | | |
| | | >sp\|Q64426\|Q64426 HISTONE H2A | | | | | | | Ovarian | | |
| | | (FRAGMENT). Length = 137 | | | | | | | | | |
| 529 | 841169 | | | 21 | 440 | | | HCFOF83 | Lung, | | |
| | | | | | | | | | Prostate, | | |
| | | | | | | | | | Colon, | | |
| | | | | | | | | | Breast/ | | |
| | | | | | | | | | Ovarian | | |
| 530 | 841172 | CLN3 protein [Homo sapiens] >gnl\|PID\|e283670 | gi\|1039423 | 291 | 740 | 100 | 100 | HCHAG93 | Prostate, | | |
| | | CLN3 protein [Homo sapiens] >gi\|2947055 | | | | | | | Breast/ | | |
| | | (AC002425) CLN3 [Homo sapiens] >gi\|3337387 | | | | | | | Ovarian | | |
| | | (AC002544) CLN [Homo sapiens] >gi\|4102729 | | | | | | | | | |
| | | (AF015593) CLN3 protein [Homo sapiens] | | | | | | | | | |
| | | >pir\|A57219\|A57219 Batten disease-related prot | | | | | | | | | |
| 531 | 841174 | zinc finger protein 7 (ZFP7) [Homo sapiens] | gi\|340446 | 3 | 386 | 98 | 98 | HCHAW34 | Prostate, | | |
| | | >pir\|A34612\|A34612 zinc finger protein ZNF7 - | | | | | | | Breast/ | | |
| | | human Length = 686 | | | | | | | Ovarian | | |
| 532 | 841179 | (AF069517) RNA binding protein DEF-3 [Homo | gi\|3212101 | 549 | 1742 | 85 | 85 | HCHBU86 | Lung, | | |
| | | sapiens] >sp\|O75524\|O75524 RNA BINDING | | | | | | | Pancreas, | | |
| | | PROTEIN DEF-3. Length = 1123 | | | | | | | Prostate | | |
| 533 | 841183 | keratin 18 [Homo sapiens] >gi\|307081 keratin 18 | gi\|386844 | 1 | 501 | 80 | 92 | HCHCE20 | Lung, | | |
| | | precursor [Homo sapiens] >gi\|34037 cytokeratin 18 | | | | | | | Pancreas, | | |
| | | [Homo sapiens] >pir\|S05481\|S05481 keratin 18, | | | | | | | Prostate, | | |
| | | type I, cytoskeletal - human >sp\|P05783\| | | | | | | | Colon, | | |
| | | K1CR_HUMAN KERATIN, TYPE I | | | | | | | Breast/ | | |
| | | CYTOSKELETAL 18 (CYTOKERATIN 18) | | | | | | | | | |
| | | (K18) (CK 1 | | | | | | | Ovarian | | |
| 534 | 841186 | (AJ006215) CMP-N-acetylneuraminic acid | gnl\|PID\|e1314953 | 78 | 1421 | 95 | 97 | HCFCG26 | Lung, | | |
| | | synthetase [Mus musculus] >sp\|O88719\|O88719 | | | | | | | Prostate | | |
| | | CMP-N-ACETYLNEURAMINIC ACID | | | | | | | | | |
| | | SYNTHETASE (EC 2.7.7.43) | | | | | | | | | |
| | | (ACYLNEURAMINATE | | | | | | | | | |
| | | CYTIDYLYLTRANSFERASE) (CMP-SIALATE | | | | | | | | | |
| | | PYROPHOSPHORYLASE) (CMP-SIALATE | | | | | | | | | |
| | | SYNTHASE). Length = 432 | | | | | | | | | |
| 535 | 841204 | similar to beta-mannosyltransferase [Caenorhabditis | gi\|470340 | 1 | 1407 | 51 | 72 | HCEFZ02 | Lung, | | |
| | | elegans] >sp\|Q22797\|Q22797 SIMILAR TO BETA- | | | | | | | Pancreas, | | |
| | | MANNOSYLTRANSFERASE. Length = 487 | | | | | | | Prostate, | | |
| | | | | | | | | | Colon | | |
| 536 | 841206 | | | 251 | 1192 | | | HCEEM52 | Lung, | | |
| | | | | | | | | | Prostate | | |
| 537 | 841207 | (AF062484) SDP8 [Mus musculus] | gi\|3126981 | 193 | 585 | 41 | 63 | HMTAR23 | Prostate, | | |
| | | >spp51 O70493\|O70493 SDP8. Length = 165 | | | | | | | Colon | | |
| 538 | 841211 | (AC004908) zinc finger protein from gene of | gi\|4159888 | 110 | 766 | 47 | 62 | HCEDM42 | Prostate, | | |
| | | uncertain exon structure; similar to Q99676 | | | | | | | Breast/ | | |
| | | (PID:g3025333) [Homo sapiens] Length = 430 | | | | | | | Ovarian | | |
| 539 | 841225 | membrane protein [Homo sapiens] >gi\|1048989 | gi\|508496 | 41 | 865 | 88 | 88 | HCRBB01 | Lung, | | |
| | | CD9 antigen [Homo sapiens] >gi\|34769 MRP-1 | | | | | | | Pancreas, | | |
| | | (motility related protein) [Homo sapiens] | | | | | | | Prostate, | | |
| | | >bbs\|131345 CD9 antigen [human, leukocytes, | | | | | | | Colon | | |
| | | Peptide, 228 aa] [Homo sapiens] | | | | | | | | | |
| | | >pir\|A46123\|A40402 CD9 antigen - human | | | | | | | | | |
| | | >sp\|P21926\| | | | | | | | | | |
| 540 | 841229 | P1cdc47 [Homo sapiens] >pir\|S70583\|S70583 | gnl\|PID\|d1010177 | 1 | 2298 | 98 | 98 | HCEID58 | Lung, | | |
| | | CDC47 homolog - human | | | | | | | Pancreas, | | |
| | | >sp\|P33993\|MCM7_HUMAN DNA REPLICA- | | | | | | | Prostate, | | |
| | | TION LICENSING FACTOR MCM7 (CDC47 | | | | | | | Breast/ | | |
| | | HOMOLOG) (P1.1-MCM3). >gnl\|PID\|d1006386 | | | | | | | Ovarian | | |
| | | hMCM2 [Homo sapiens] {SUB 177-719} Length = | | | | | | | | | |
| | | 719 | | | | | | | | | |
| 541 | 841237 | NAD(P)H:menadione oxidoreductase [Homo | gi\|189246 | 141 | 1028 | 95 | 95 | HBMTA19 | Lung, | | |
| | | sapiens] >gi\|189292 NAD(P)H:quinone oxireductase | | | | | | | Pancreas, | | |
| | | [Homo sapiens] >pir\|A41135\|A30879 NAD(P)H | | | | | | | Prostate, | | |
| | | dehydrogenase (quinone) (EC 1.6.99.2) 1 - human | | | | | | | Colon, | | |
| | | >sp\|P15559\|DHQU_HUMAN NAD(P)H | | | | | | | Breast/ | | |
| | | DEHYDROGENASE (QUINONE) 1 (EC 1.6.99.2) | | | | | | | Ovarian | | |
| | | (QUINON | | | | | | | | | |
| 542 | 841241 | Thy-1 [Homo sapiens] >pir\|A02106\|TDHU Thy-1 | gi\|339683 | 128 | 622 | 86 | 87 | HBXFG67 | Lung, | | |
| | | membrane glycoprotein precursor - human | | | | | | | Pancreas, | | |
| | | Length = 161 | | | | | | | Prostate, | | |
| | | | | | | | | | Breast/ | | |
| | | | | | | | | | Ovarian | | |
| 543 | 841259 | (AD001528) spermidine aminopropyltransferase | gi\|2198557 | 3 | 1199 | 93 | 93 | HCEIC53 | Lung, | | |
| | | [Homo sapiens] >sp\|O00544\|O00544 SPERMIDINE | | | | | | | Pancreas, | | |
| | | AMINOPROPYLTRANSFERASE, Length = 366 | | | | | | | Prostate, | | |
| | | | | | | | | | Breast/ | | |
| | | | | | | | | | Ovarian | | |
| 544 | 841260 | FKBP51 [Homo sapiens] >pir\|JC5422\|JC5422 | gi\|1916641 | 3 | 863 | 88 | 91 | HBODM14 | Lung, | | |
| | | FK506-binding protein, FKBP51 - human | | | | | | | Prostate | | |
| | | >sp\|Q13451\|FKB5_HUMAN 51 KD FK506- | | | | | | | | | |
| | | BINDING PROTEIN (FKBP51) (PEPTIDYL- | | | | | | | | | |
| | | PROLYL CIS-TRANS ISOMERASE) (EC 5.2.1.8) | | | | | | | | | |
| | | (PPIASE) (ROTAMASE) (54 KD | | | | | | | | | |
| | | PROGESTERONE RECEPTOR-ASSOCIATED | | | | | | | | | |
| | | IMMUNO | | | | | | | | | |
| 545 | 841264 | | | 1 | 618 | | | HBJHU33 | Lung, | | |
| | | | | | | | | | Pancreas, | | |
| | | | | | | | | | Prostate | | |
| 546 | 841275 | Lutheran blood group glycoprotein [Homo sapiens] | gi\|603560 | 2 | 1183 | 89 | 89 | HBGMO35 | Prostate, | | |
| | | >pir\|I38000\|I38000 Lutheran blood group | | | | | | | Breast/ | | |
| | | glycoprotein precursor - human | | | | | | | Ovarian | | |
| | | >sp\|P50895\|LU_HUMAN LUTHERAN BLOOD | | | | | | | | | |
| | | GROUP GLYCOPROTEIN PRECURSOR (B-CAM | | | | | | | | | |
| | | CELL SURFACE GLYCOPROTEIN) | | | | | | | | | |
| | | (AUBERGER B ANTIGEN) (F8/G253 ANTIGEN | | | | | | | | | |
| 547 | 841311 | (AF019661) zeta proteasome chain; PSMA5 [Mus | gi\|3805976 | 45 | 836 | 100 | 100 | HCFMY64 | Lung, | | |
| | | musculus] >sp\|G3805976\|G3805976 ZETA | | | | | | | Pancreas, | | |
| | | PROTEASOME CHAIN. Length = 241 | | | | | | | Prostate, | | |
| | | | | | | | | | Breast/ | | |
| | | | | | | | | | Ovarian | | |
| 548 | 841313 | neuronal protein 15.6 [unidentified] | gnl\|PID\|e274746 | 11 | 544 | 75 | 82 | HBGNM82 | Lung, | | |
| | | >sp\|O09111\|O09111 NEURONAL PROTEIN 15.6. | | | | | | | Prostate, | | |
| | | Length = 133 | | | | | | | Colon, | | |
| | | | | | | | | | Breast/ | | |
| | | | | | | | | | Ovarian | | |
| 549 | 841317 | | | 1155 | 1553 | | | HAPSG63 | Lung, | | |
| | | | | | | | | | Prostate | | |
| 550 | 841322 | unnamed protein product [unidentified] >gi\|496609 | gnl\|PID\|e306259 | 200 | 1402 | 95 | 95 | HAMGE23 | Pancreas, | | |
| | | basic transcripion factor 2, 44 kD subunit [Homo | | | | | | | Prostate | | |
| | | sapiens] >sp\|Q13888\|Q13888 BASIC | | | | | | | | | |
| | | TRANSCRIPION FACTOR 2, 44 KD SUBUNIT | | | | | | | | | |
| | | (BASIC TRANSCRIPTION FACTOR 2 P44) | | | | | | | | | |
| | | (FRAGMENT). >gi\|1737212 basic transcription | | | | | | | | | |
| | | factor | | | | | | | | | |
| 551 | 841331 | | | 2 | 955 | | | HHFJL19 | Lung, | | |
| | | | | | | | | | Breast/ | | |
| | | | | | | | | | Ovarian | | |
| 552 | 841332 | alpha-2-macroglobulin precursor [Homo sapiens] | gi\|177870 | 2 | 3856 | 98 | 98 | HAPQO79 | Lung, | | |
| | | >pir\|A94033\|MAHU alpha-2-macroglobulin | | | | | | | Prostate | | |
| | | precursor - human >sp\|P01023\|A2MG_HUMAN | | | | | | | | | |
| | | ALPHA-2-MACROGLOBULIN PRECURSOR | | | | | | | | | |
| | | (ALPHA-2-M). >gi\|825615 alpha2-macroglobulin | | | | | | | | | |
| | | [Homo sapiens] {SUB 672-746} Length = 1474 | | | | | | | | | |
| 553 | 841338 | | | 1139 | 1363 | | | HAJBU58 | Pancreas, | | |
| | | | | | | | | | Prostate | | |
| 554 | 841345 | yeast methionyl-tRNA synthetase homolog [Homo | gnl\|PID\|e218477 | 2 | 2761 | 94 | 94 | HAJAQ46 | Lung, | | |
| | | sapiens] >pir\|JC5224\|JC5224 methionine-tRNA | | | | | | | Pancreas, | | |
| | | ligase (EC 6.1.1.10) - human >gi\|804996 | | | | | | | Prostate, | | |
| | | mitoxantrone-resistance associated gene [Homo | | | | | | | Breast/ | | |
| | | sapiens] {SUB 423-900} Length = 900 | | | | | | | Ovarian | | |
| 555 | 841349 | | | 151 | 1578 | | | HMWFM73 | Lung, | | |
| | | | | | | | | | Pancreas, | | |
| | | | | | | | | | Prostate, | | |
| | | | | | | | | | Breast/ | | |
| | | | | | | | | | Ovarian | | |
| 556 | 841355 | glucose regulated protein 94 (400 AA) [Mesocricetus | gi\|49628 | 2 | 562 | 96 | 99 | HAJAA78 | Prostate, | | |
| | | auratus] >pir\|A26258\|A26258 endoplasmin - hamster | | | | | | | Breast/ | | |
| | | (fragment) >sp\|P08712\|ENPL_MESAU | | | | | | | Ovarian | | |
| | | ENDOPLASMIN (94 KD GLUCOSE- | | | | | | | | | |
| | | REGULATED PROTEIN) (GRP94) | | | | | | | | | |
| | | (FRAGMENT). Length = 400 | | | | | | | | | |
| 557 | 841417 | arginine-rich nuclear protein [Homo sapiens] | gi\|178997 | 708 | 1835 | 73 | 73 | HNTCL10 | Lung, | | |
| | | >pir\|A40988\|A40988 54K arginine-rich nuclear | | | | | | | Pancreas, | | |
| | | protein - human >sp\|Q05519\|Q05519 ARGININE- | | | | | | | Colon, | | |
| | | RICH 54 KD NUCLEAR PROTEIN. Length = 484 | | | | | | | Breast/ | | |
| | | | | | | | | | Ovarian | | |
| 558 | 841548 | | | 278 | 613 | | | HBXDN79 | Lung, | | |
| | | | | | | | | | Breast/ | | |
| | | | | | | | | | Ovarian | | |
| 559 | 841632 | (AF073298) 4F5rel [Homo sapiens] >gi\|3641536 | gi\|3641538 | 49 | 255 | 100 | 100 | HTLGV25 | Lung, | | |
| | | (AF073297) 4F5rel [Mus musculus] | | | | | | | Breast/ | | |
| | | >sp\|O75918\|O75918 4F5REL. >sp\|O88891\|O88891 | | | | | | | Ovarian | | |
| | | 4F5REL. Length = 59 | | | | | | | | | |
| 560 | 841662 | HYA22 protein - human Length = 338 | pir\|JC5707\| | 2 | 532 | 78 | 81 | HLQCP61 | Prostate, | | |
| | | | JC5707 | | | | | | Colon | | |
| 561 | 841771 | | | 901 | 1146 | | | HSYDN46 | Lung, | | |
| | | | | | | | | | Pancreas | | |
| 562 | 841827 | RTP [Homo sapiens] >gi\|3046386 (AF004162) | gnl\|PID\|d1014198 | 358 | 1110 | 97 | 97 | HHFDI26 | Pancreas, | | |
| | | nickel-specific induction protein [Homo sapiens] | | | | | | | Prostate | | |
| | | >sp\|Q92597\|Q92597 RTP, COMPLETE CDS. | | | | | | | | | |
| | | Length = 394 | | | | | | | | | |
| 563 | 841835 | | | 1232 | 1612 | | | HWLJT54 | Lung, | | |
| | | | | | | | | | Pancreas, | | |
| | | | | | | | | | Prostate, | | |
| | | | | | | | | | Colon, | | |
| | | | | | | | | | Breast/ | | |
| | | | | | | | | | Ovarian | | |
| 564 | 842259 | | | 2 | 691 | | | HHFGF52 | Lung, | | |
| | | | | | | | | | Pancreas, | | |
| | | | | | | | | | Prostate, | | |
| | | | | | | | | | Colon | | |
| 565 | 842463 | | | 600 | 836 | | | HETJY08 | Lung, | | |
| | | | | | | | | | Pancreas | | |
| 566 | 842595 | ERp28 [Homo sapiens] >sp\|P30040\| | gnl\|PID\|e1314951 | 50 | 916 | 92 | 92 | HUFAB73 | Lung, | | |
| | | ER29_HUMAN ENDOPLASMIC RETICULUM | | | | | | | Breast/ | | |
| | | PROTEIN ERP29 PRECURSOR (ERP31) (ERP28). | | | | | | | Ovarian | | |
| | | >sp\|E1314951\|E1314951 ERP28 PRECURSOR. | | | | | | | | | |
| | | Length = 261 | | | | | | | | | |
| 567 | 842722 | | | 2 | 1465 | | | HYABB24 | Lung, | | |
| | | | | | | | | | Pancreas, | | |
| | | | | | | | | | Prostate, | | |
| | | | | | | | | | Breast/ | | |
| | | | | | | | | | Ovarian | | |
| 568 | 842815 | | | 780 | 971 | | | HPMSG47 | Pancreas, | | |
| | | | | | | | | | Colon | | |
| 569 | 842818 | (AF038954) vacuolar H(+)-ATPase subunit [Homo | gi\|3329378 | 91 | 477 | 79 | 79 | HSKJF03 | Lung, | | |
| | | sapiens] >sp\|O75348\|O75348 VACUOLAR H(+)- | | | | | | | Pancreas, | | |
| | | ATPASE SUBUNIT. Length = 118 | | | | | | | Prostate, | | |
| | | | | | | | | | Breast/ | | |
| | | | | | | | | | Ovarian | | |
| 570 | 843251 | (AF057297) ornithine decarboxylase antizyme 2 | gi\|3766170 | 215 | 745 | 92 | 92 | HTLIF83 | Lung, | | |
| | | [Homo sapiens] >gi\|3766170 (AF057297) ornithine | | | | | | | Breast/ | | |
| | | decarboxylase antizyme 2 [Homo sapiens] | | | | | | | Ovarian | | |
| | | >sp\|G3766170\|G3766170 ORNITHINE | | | | | | | | | |
| | | DECARBOXYLASE ANTIZYME 2. | | | | | | | | | |
| | | >gnl\|PID\|d1020346 product is unknown; seizure- | | | | | | | | | |
| | | related gene [Mus | | | | | | | | | |
| 571 | 843422 | | | 563 | 898 | | | HISCW60 | Lung, | | |
| | | | | | | | | | Pancreas, | | |
| | | | | | | | | | Colon, | | |
| | | | | | | | | | Breast/ | | |
| | | | | | | | | | Ovarian | | |
| 572 | 843784 | | | 1307 | 1864 | | | HCECS78 | Lung, | | |
| | | | | | | | | | Pancreas | | |
| 573 | 844017 | | | 243 | 566 | | | HKABG31 | Lung, | | |
| | | | | | | | | | Colon | | |
| 574 | 844138 | Epithelin 1 & 2 [Homo sapiens] >gi\|3005730 | gi\|31193 | 104 | 1966 | 100 | 100 | HDPWW59 | Lung, | | |
| | | (AF055008) epithelin 1 and 2 [Homo sapiens] | | | | | | | Breast/ | | |
| | | >pir\|JC1284\|GYHU granulin precursor - human | | | | | | | Ovarian | | |
| | | >sp\|G3005730\|G3005730 EPITHELIN 1 AND 2. | | | | | | | | | |
| | | Length = 593 | | | | | | | | | |
| 575 | 844166 | (AF039689) antigen NY-CO-7 [Homo sapiens] | gi\|3170178 | 1 | 1020 | 94 | 94 | HABAE22 | Lung, | | |
| | | >sp\|O60526\|O60526 ANTIGEN NY-CO-7. Length = | | | | | | | Pancreas, | | |
| | | 303 | | | | | | | Prostate, | | |
| | | | | | | | | | Breast/ | | |
| | | | | | | | | | Ovarian | | |
| 576 | 844194 | | | 3 | 707 | | | HE8PB56 | Lung, | | |
| | | | | | | | | | Pancreas, | | |
| | | | | | | | | | Prostate, | | |
| | | | | | | | | | Colon, | | |
| | | | | | | | | | Breast/ | | |
| | | | | | | | | | Ovarian | | |
| 577 | 844394 | | | 378 | 635 | | | HHEUP26 | Lung, | | |
| | | | | | | | | | Pancreas, | | |
| | | | | | | | | | Breast/ | | |
| | | | | | | | | | Ovarian | | |
| 578 | 844450 | weak similarity to rat TEGT protein (GI:456207) | gi\|1825601 | 113 | 1165 | 61 | 78 | HTXOX92 | Lung, | | |
| | | [Caenorhabditis elegans] >sp\|P91373\|P91373 | | | | | | | Pancreas | | |
| | | SIMILARITY TO RAT TEGT PROTEIN. Length = | | | | | | | | | |
| | | 342 | | | | | | | | | |
| 579 | 844534 | | | 2 | 244 | | | HCE3I65 | Lung, | | |
| | | | | | | | | | Pancreas, | | |
| | | | | | | | | | Breast/ | | |
| | | | | | | | | | Ovarian | | |
| 580 | 844535 | isocitrate dehydrogenase (NADP+) [Homo sapiens] | gi\|872121 | 3 | 1454 | 96 | 96 | HCWGE38 | Lung, | | |
| | | >pir\|S57499\|S57499 isocitrate dehydrogenase | | | | | | | Breast/ | | |
| | | (NADP+) (EC 1.1.1.42) precursor, mitochondrial - | | | | | | | Ovarian | | |
| | | human >sp\|P48735\|IDHP_HUMAN ISOCITRATE | | | | | | | | | |
| | | DEHYDROGENASE [NADP], MITOCHONDRIAL | | | | | | | | | |
| | | PRECURSOR (EC 1.1.1.42) (OXALOSUCCINATE | | | | | | | | | |
| 581 | 844644 | (AJ002308) synaptogyrin 2 [Homo sapiens] | gnl\|PID\|e1254905 | 1 | 720 | 91 | 91 | HDPBQ51 | Lung, | | |
| | | >sp\|O43760\|O43760 SYNAPTOGYRIN 2. Length = | | | | | | | Breast/ | | |
| | | 224 | | | | | | | Ovarian | | |
| 582 | 844653 | immunoglobulin lambda light chain gene product | gi\|33718 | 1 | 732 | 89 | 91 | HCRQC91 | Lung, | | |
| | | [Homo sapiens] >pir\|S25745\|S25745 Ig lambda | | | | | | | Pancreas, | | |
| | | chain - human (fragment) Length = 226 | | | | | | | Colon | | |
| 583 | 844659 | cathepsin D [Homo sapiens] >gi\|29678 precursor | gi\|179948 | 21 | 539 | 94 | 94 | HLDDQ71 | Lung, | | |
| | | polypeptide (AA - 20 to 392) [Homo sapiens] | | | | | | | Breast/ | | |
| | | >gi\|181180 preprocathepsin D [Homo sapiens] | | | | | | | Ovarian | | |
| | | >pir\|A25771\|KHHUD cathepsin D (EC 3.4.23.5) | | | | | | | | | |
| | | precursor - human >sp\|P07339\|CATD_HUMAN | | | | | | | | | |
| | | CATHEPSIN D PRECURSOR (EC 3.4.23.5). | | | | | | | | | |
| 584 | 844796 | | | 2 | 1054 | | | HE6BS09 | Colon, | | |
| | | | | | | | | | Breast/ | | |
| | | | | | | | | | Ovarian | | |
| 585 | 844812 | (AF040642) contains similarity to transacylases | gi\|2746788 | 13 | 1542 | 33 | 59 | HDPFV13 | Lung, | | |
| | | [Caenorhabditis elegans] >sp\|O44793\|O44793 | | | | | | | Pancreas | | |
| | | C50D2.7 PROTEIN. Length = 895 | | | | | | | | | |
| 586 | 844894 | E25B protein [Mus musculus] >sp\|O89051\|O89051 | gi\|3746127 | 66 | 1013 | 96 | 99 | HCLBO47 | Lung, | | |
| | | E25B PROTEIN. Length = 266 | | | | | | | Pancreas, | | |
| | | | | | | | | | Colon | | |
| 587 | 845361 | phosphoglycerate kinase (EC 2.7.2.3) [Homo | gi\|387020 | 39 | 1232 | 100 | 100 | HHEUJ91 | Pancreas, | | |
| | | sapiens] >gi\|387021 phosphoglycerate kinase [Homo | | | | | | | Colon | | |
| | | sapiens] >gi\|35435 coding sequence [Homo sapiens] | | | | | | | | | |
| | | >pir\|I59050\|KIHUG phosphoglycerate kinase (EC | | | | | | | | | |
| | | 2.7.2.3) - human Length = 417 | | | | | | | | | |
| 588 | 845620 | | | 508 | 1254 | | | HWHGQ46 | Lung, | | |
| | | | | | | | | | Pancreas, | | |
| | | | | | | | | | Prostate, | | |
| | | | | | | | | | Breast/ | | |
| | | | | | | | | | Ovarian | | |
| 589 | 845639 | leukocyte antigen F [Homo sapiens] >gi\|3273731 | gi\|312407 | 2 | 814 | 90 | 90 | HCFNA68 | Lung, | | |
| | | (AF055066) MHC class I HLA-F [Homo sapiens] | | | | | | | Pancreas, | | |
| | | >pir\|A60384\|A60384 MHC class I histocompatibility | | | | | | | Colon, | | |
| | | antigen HLA-F alpha chain Dew3 precursor - human | | | | | | | Breast/ | | |
| | | >sp\|P30511\|HLAF_HUMAN HLA CLASS I | | | | | | | Ovarian | | |
| | | HISTOCOMPATIBILITY ANTIGEN, F A | | | | | | | | | |
| 590 | 845660 | Cyr61 [Homo sapiens] >gnl\|PID\|e311857 Gig1 | gi\|2130527 | 1 | 1365 | 91 | 91 | HKAJW79 | Lung, | | |
| | | protein [Homo sapiens] >gi\|2196782 (AF003594) | | | | | | | Pancreas, | | |
| | | growth-factor inducible immediate early gene | | | | | | | Prostate, | | |
| | | product CYR61 [Homo sapiens] >gnl\|PID\|e1249319 | | | | | | | Breast/ | | |
| | | hCYR61 protein [Homo sapiens] | | | | | | | Ovarian | | |
| | | >sp\|O00622\|CYR6_HUMAN CYR61 PROTEIN | | | | | | | | | |
| | | PRECURSO | | | | | | | | | |
| 591 | 845720 | | | 1 | 261 | | | HKDAF83 | Lung, | | |
| | | | | | | | | | Breast/ | | |
| | | | | | | | | | Ovarian | | |
| 592 | 845785 | | | 180 | 509 | | | HSODT09 | Pancreas, | | |
| | | | | | | | | | Colon, | | |
| | | | | | | | | | Breast/ | | |
| | | | | | | | | | Ovarian | | |
| 593 | 845897 | | | 1369 | 1677 | | | HADAB09 | Pancreas, | | |
| | | | | | | | | | Breast/ | | |
| | | | | | | | | | Ovarian | | |
| 594 | 845922 | beta actin [Ovis aries] >gi\|2661136 (AF035774) | gi\|2182269 | 1 | 1239 | 100 | 100 | HWLQQ65 | Lung, | | |
| | | beta actin [Equus caballus] >gi\|3320892 | | | | | | | Pancreas, | | |
| | | (AF076190) beta-actin [Trichosurus vulpecula] | | | | | | | Colon | | |
| | | >gi\|177968 cytoplasmic beta actin [Homo sapiens] | | | | | | | | | |
| | | >gnl\|PID\|d1021082 (AB004047) beta-actin [Homo | | | | | | | | | |
| | | sapiens] >gi\|28252 beta-act | | | | | | | | | |
| 595 | 846016 | (AB005894) ecalectin [Homo sapiens] | gnl\|PID\|d1032501 | 47 | 337 | 97 | 97 | HDPIT90 | Lung, | | |
| | | >sp\|O75028\|O75028 ECALECTIN. Length = 323 | | | | | | | Pancreas | | |
| 596 | 846040 | 0-44 protein [Rattus sp.] >pir\|I57612\|I57612 Rat | gi\|203072 | 127 | 585 | 84 | 88 | HLICQ57 | Lung, | | |
| | | brain 0-44 mRNA, segment 2 - rat | | | | | | | Pancreas, | | |
| | | >sp\|P38718\|P044_RAT 0-44 PROTEIN. Length = | | | | | | | Prostate, | | |
| | | 127 | | | | | | | Colon, | | |
| | | | | | | | | | Breast/ | | |
| | | | | | | | | | Ovarian | | |
| 597 | 846073 | protein p68 (AA 1-614) [Homo sapiens] >gi\|35220 | gi\|38318 | 23 | 1051 | 91 | 92 | HCWDW01 | Lung, | | |
| | | p68 protein (AA 1-614) [Homo sapiens] | | | | | | | Pancreas | | |
| | | >gi\|2599360 (AF015812) RNA helicase p68 [Homo | | | | | | | | | |
| | | sapiens] >pir\|JC1087\|JC1087 RNA helicase, ATP- | | | | | | | | | |
| | | dependent - human >sp\|P17844\|DDX5_HUMAN | | | | | | | | | |
| | | PROBABLE RNA-DEPENDENT HELICASE P68 | | | | | | | | | |
| 598 | 846257 | | | 286 | 651 | | | HPWDE09 | Lung, | | |
| | | | | | | | | | Prostate | | |
| 599 | HTXPN06R | | | 65 | 286 | | | HTXPN06 | Lung, | | |
| | | | | | | | | | Breast/ | | |
| | | | | | | | | | Ovarian | | |
| 600 | H2LAQ12R | | | 3 | 311 | 71 | 79 | H2LAQ12 | Pancreas, | | |
| | | | | | | | | | Colon | | |
| 601 | HWAFU16R | (AB000911) ribosomal protein [Sus scrofa] | gnl\|PID\|d1019961 | 3 | 320 | 86 | 86 | HWAFU16 | Lung, | | |
| | | >gnl\|PID\|e1339008 (AL031228) dJ1033B10.4 (40S | | | | | | | Pancreas, | | |
| | | ribosomal protein S18 (RPS18, KE-3)) [Homo | | | | | | | Colon, | | |
| | | sapiens] >gi\|198580 ribosomal protein [Mus | | | | | | | Breast/ | | |
| | | musculus] >gi\|433447 ribosomal protein S18 [Rattus | | | | | | | Ovarian | | |
| | | rattus] >gi\|3811382 (AF100956) | | | | | | | | | |
| 602 | HAEAM91R | (AB005218) L subunit of photosynthetic reaction | gnl\|PID\|d1026481 | 174 | 215 | 66 | 66 | HAEAM91 | Pancreas, | | |
| | | center complex [Acidiphilium rubrum] | | | | | | | Colon, | | |
| | | >gnl\|PID\|d1026488 (AB005219) L subunit of | | | | | | | Breast/ | | |
| | | photosynthetic reaction center complex | | | | | | | Ovarian | | |
| | | [Acidiphilium angustum] >sp\|O70105\|O70105 L | | | | | | | | | |
| | | SUBUNIT OF PHOTOSYNTHETIC REACTION | | | | | | | | | |
| | | CENTER COM | | | | | | | | | |
| 603 | HOEMT44R | (AB010959) natural killer cell enhancing factor | gnl\|PID\|d1033048 | 54 | 431 | 84 | 93 | HOEMT44 | Lung, | | |
| | | [Cyprinus carpio] Length = 199 | | | | | | | Colon, | | |
| | | | | | | | | | Breast/ | | |
| | | | | | | | | | Ovarian | | |
| 604 | HE2OW04R | (AF001631) glucose-regulated protein GRP94 | gi\|2581793 | 7 | 297 | 87 | 89 | HE2OW04 | Lung, Colon | | |
| | | [Oryctolagus cuniculus] >sp\|O18750\|ENPL_RABIT | | | | | | | | | |
| | | ENDOPLASMIN (94 KD GLUCOSE- | | | | | | | | | |
| | | REGULATED PROTEIN) (GRP94) (FRAGMENT). | | | | | | | | | |
| | | Length = 716 | | | | | | | | | |
| 605 | HFCFG25R | (AF012422) ribosomal protein 46 [Drosophila | gi\|23070l4 | 3 | 143 | 65 | 87 | HFCFG25 | Lung, | | |
| | | melanogaster] Length = 51 | | | | | | | Colon, | | |
| | | | | | | | | | Breast/ | | |
| | | | | | | | | | Ovarian | | |
| 606 | HAPQP94R | (AF018432) dUTPase [Homo sapiens] >gi\|1144332 | gi\|2443581 | 3 | 320 | 97 | 97 | HAPQP94 | Lung, | | |
| | | deoxyuridine nucleotidohydrolase [Homo sapiens] | | | | | | | Pancreas, | | |
| | | >gi\|1421818 deoxyuridine triphosphatase [Homo | | | | | | | Colon | | |
| | | sapiens] >pir\|G02777\|G02777 dUTP | | | | | | | | | |
| | | pyrophosphatase (EC 3.6.1.23) - human >gi\|292877 | | | | | | | | | |
| | | dUTP nucleotidohydrolase [Homo sa | | | | | | | | | |
| 607 | H2CBI37R | (AF042107) ribosomal protein S3a [Eimeria tenella] | gi\|2792508 | 3 | 182 | 64 | 64 | H2CBI37 | Colon, | | |
| | | >gi\|2792508 (AF042107) ribosomal protein S3a | | | | | | | Breast/ | | |
| | | [Elmeria tenella] Length = 264 | | | | | | | Ovarian | | |
| 608 | HEOPQ13R | (AF042505) cytochrome b [Homo sapiens] | gi\|3372377 | 82 | 216 | 80 | 82 | HEOPQ13 | Lung, | | |
| | | >sp\|G3372377\|G3372377 CYTOCHROME B | | | | | | | | Colon | |
| | | (FRAGMENT). Length = 380 | | | | | | | | | |
| 609 | HCRNC25R | (AF051894) 15 kDa selenoprotein [Homo sapiens] | gi\|3095111 | 61 | 162 | 100 | 100 | HCRNC25 | Lung, | | |
| | | Length= 161 | | | | | | | Pancreas, | | |
| | | | | | | | | | Colon | | |
| 610 | HFITF28R | (AF056218) superficial zone protein [Bos taurus] | gi\|3676501 | 3 | 185 | 73 | 80 | HFITF28 | Pancreas, | | |
| | | >sp\|O77765\|077765 SUPERFICIAL ZONE | | | | | | | Colon | | |
| | | PROTEIN (FRAGMENT). Length = 401 | | | | | | | | | |
| 611 | H2LAY26R | | | 24 | 155 | | | H2LAY26 | Pancreas, | | |
| | | | | | | | | | Colon | | |
| 612 | HAPQA06R | 40-kDa keratin protein [Homo sapiens] | gi\|386803 | 2 | 355 | 62 | 62 | HAPQA06 | Lung, | | |
| | | >pir\|A31370\|KRHU9 keratin 19, type I, cyto- | | | | | | | Pancreas, | | |
| | | skeletal - human Length = 400 | | | | | | | Colon, | | |
| | | | | | | | | | Breast/ | | |
| | | | | | | | | | Ovarian | | |
| 613 | HAQBM72R | 40-kDa keratin protein [Homo sapiens] | gi\|386803 | 2 | 145 | 81 | 81 | HAQBM72 | Pancreas, | | |
| | | >pir\|A31370\|KRHU9 keratin 19, type I, cyto- | | | | | | | Colon | | |
| | | skeletal - human Length = 400 | | | | | | | | | |
| 614 | HBGOK18R | 40-kDa keratin protein [Homo sapiens] | gi\|386803 | 1 | 429 | 91 | 92 | HBGOK18 | Lung, | | |
| | | >pir\|A31370\|KRHU9 keratin 19, type I, cyto- | | | | | | | Pancreas, | | |
| | | skeletal - human Length = 400 | | | | | | | Colon, | | |
| | | | | | | | | | Breast/ | | |
| | | | | | | | | | Ovarian | | |
| 615 | H2MAC07R | acidic ribosomal phosphoprotein (P1) [Homo | gi\|190234 | 111 | 458 | 100 | 100 | H2MAC07 | Lung, | | |
| | | sapiens] >pir\|B27125\|R6HUP1 acidic ribosomal | | | | | | | Colon, | | |
| | | protein P1 - human Length = 114 | | | | | | | Breast/ | | |
| | | | | | | | | | Ovarian | | |
| 616 | HTWKF26R | acidic ribosomal phosphoprotein (P2) [Homo | gi\|190236 | 1 | 345 | 95 | 96 | HTWKF26 | Lung, | | |
| | | sapiens] >pir\|C27125\|R6HUP2 acidic ribosomal | | | | | | | Pancreas, | | |
| | | protein P2 - human Length = 115 | | | | | | | Breast/ | | |
| | | | | | | | | | Ovarian | | |
| 617 | HTAHR89R | ADP,ATP carrier protein T2 - human | pir\|S03894\| | 13 | 408 | 96 | 96 | HTAHR89 | Lung, | | |
| | | >sp\|P12236\|ADT3_HUMAN ADP,ATP CARRIER | S03894 | | | | | | | Pancreas | |
| | | PROTEIN, LIVER ISOFORM T2 (ADP/ATP | | | | | | | | | |
| | | TRANSLOCASE 3) (ADENINE NUCLEOTIDE | | | | | | | | | |
| | | TRANSLOCATOR 3) (ANT 3). Length = 298 | | | | | | | | | |
| 618 | HOACE24R | alcohol dehydrogenase [Homo sapiens] | gi\|178372 | 3 | 374 | 91 | 92 | HOACE24 | Pancreas, | | |
| | | >pir\|A33371 IDEHUEl aldehyde dehydrogenase | | | | | | | Colon | | |
| | | (NAD+) (EC 1.2.1.3) 1, cytosolic - human | | | | | | | | | |
| | | >sp\|P00352\|DHAC_HUMAN ALDEHYDE | | | | | | | | | |
| | | DEHYDROGENASE, CYTOSOLIC (EC 1.2.1.3) | | | | | | | | | |
| | | (CLASS 1) (ALHDII) (ALDH-E1). {SUB 2-501} | | | | | | | | | |
| | | Length = 501 | | | | | | | | | |
| 619 | HOELC27R | aldolase A (EC 4.1.3.13) [Homo sapiens] >gi\|28597 | gi\|178351 | 68 | 604 | 100 | 100 | HOELC27 | Lung, | | |
| | | aldolase A (AA 1-364) [Homo sapiens] | | | | | | | Pancreas, | | |
| | | >pir\|S 14084\|ADHUA fructose-bisphosphate aldolase | | | | | | | Breast/ | | |
| | | (EC 4.1.2.13) A - human | | | | | | | Ovarian | | |
| | | >sp\|P04075\|ALFA_HUMAN FRUCTOSE- | | | | | | | | | |
| | | BISPHOSPHATE ALDOLASE A (EC 4.1.2.13) | | | | | | | | | |
| | | (MUSCLE-TYPE ALDOLASE). {S | | | | | | | | | |
| 620 | HWLBS25R | aldolase A [Gallus gallus] >gi\|409193 aldolase A | gi\|409191 | 3 | 95 | 90 | 93 | HWLBS25 | Lung, | | |
| | | [Gallus gallus] >bbs\|167536 aldolase C = fructose- | | | | | | | Pancreas, | | |
| | | 1,6-biphosphate aldolase {EC 4.1.2.13} [chickens, | | | | | | | Colon, | | |
| | | brain, Peptide Partial, 42 aa] [Gallus gallus] | | | | | | | Breast/ | | |
| | | >pir\|151291\|151291 aldolase C - chicken (fragment) | | | | | | | Ovarian | | |
| | | Length = 4 | | | | | | | | | |
| 621 | HWLVW62R | alpha-1 type III collagen [Homo sapiens] Length = | gi\|180414 | 1 | 213 | 97 | 97 | HWLVW62 | Lung, | | |
| | | 345 | | | | | | | Colon, | | |
| | | | | | | | | | Breast/ | | |
| | | | | | | | | | Ovarian | | |
| 622 | HALSE08R | ALPHA-1-ANTICHYMOTRYPSIN PRECURSOR | sp\|P01011\| | 3 | 233 | 95 | 97 | HALSE08 | Lung, Pancreas | | |
| | | (ACT), >gi\|4165890 (AF089747) alpha-1- | AACT_HUMAN | | | | | | | | |
| | | antichymotrypsin precursor [Homo sapiens] {SUB | | | | | | | | | |
| | | 17-423} >gi\|177933 alpha-1-antichymotrypsin | | | | | | | | | |
| | | precursor [Homo sapiens] {SUB 22-423} >gi\|28332 | | | | | | | | | |
| | | alpha 1 antichymotrypsin [Homo sapiens] {SU | | | | | | | | | |
| 623 | HFKHD94R | alpha-2 chain precursor (AA - 25 to 1018) (3416 is | gi\|30076 | 2 | 316 | 97 | 97 | HFKHD94 | Pancreas, | | |
| | | 2nd base in codon) [Homo sapiens] Length = 1043 | | | | | | | Breast/ | | |
| | | | | | | | | | Ovarian | | |
| 624 | HCE2M86R | alpha-adaptin (A) (AA 1-977) [Mus musculus] | gi\|49878 | 58 | 165 | 75 | 80 | HCE2M86 | Lung, Colon, | | |
| | | >pir\|A30111\|A30111 alpha-adaptin A - mouse | | | | | | | Breast/ | | |
| | | >sp\|P17426\|ADAA_MOUSE ALPHA-ADAPTIN A | | | | | | | Ovarian | | |
| | | (CLATHRIN ASSEMBLY PROTEIN COMPLEX 2 | | | | | | | | | |
| | | ALPHA-A LARGE CHAIN) (100 KD COATED | | | | | | | | | |
| | | VESICLE PROTEIN A) (PLASMA MEMBRANE | | | | | | | | | |
| | | ADAPTOR HA2/AP2 ADAPT | | | | | | | | | |
| 625 | HOFOA89R | annexin IV (placental anticoagulant protein II) | gi\|178699 | 154 | 399 | 94 | 94 | HOFOA89 | Pancreas, | | |
| | | [Homo sapiens] >gnl\|PID\|d1011889 annexin IV | | | | | | | Colon, | | |
| | | (carbohydrate-binding protein p33/41) [Homo | | | | | | | Breast/ | | |
| | | sapiens] >pir\|A42077\|A42077 annexin IV - human | | | | | | | Ovarian | | |
| | | >sp\|P09525\|ANX4_HUMAN ANNEXIN IV | | | | | | | | | |
| | | (LIPOCORTIN IV) (ENDONEXIN I) (CHROMOB | | | | | | | | | |
| 626 | HBWCN69R | beta-1,2-N-acetylglucosaminyltransferase II [Homo | gi\|902745 | 60 | 308 | 88 | 90 | HBWCN69 | Pancreas, | | |
| | | sapiens] >pir\|S66256\|S66256 alpha-1,6-mannosyl- | | | | | | | Colon | | |
| | | glycoprotein beta-1,2-N- | | | | | | | | | |
| | | acetylglucosaminyltransferase (EC 2.4.1.143) - | | | | | | | | | |
| | | human >sp\|Q10469\|GNT2_HUMAN ALPHA-1,6- | | | | | | | | | |
| | | MANNOSYL-GLYCOPROTEIN BETA-1,2-N- | | | | | | | | | |
| | | ACETYLGLUCOSAM | | | | | | | | | |
| 627 | HLQGB43R | beta-2-microglobulin [Homo sapiens] Length = 119 | gi\|179318 | 1 | 78 | 100 | 100 | HLQGB43 | Lung, | | |
| | | | | | | | | | Pancreas, | | |
| | | | | | | | | | Colon | | |
| 628 | HCROL58R | | | 3 | 506 | | | HCROL58 | Pancreas, | | |
| | | | | | | | | | Colon | | |
| 629 | HS2IFI2R | | | 83 | 475 | | | HS2IF12 | Pancreas, | | |
| | | | | | | | | | Colon | | |
| 630 | HWLWA01R | | | 2 | 538 | | | HWLWA01 | Pancreas, | | |
| 631 | HCHMV24R | | | 12 | 185 | | | HCHMV24 | Pancreas, | | |
| | | | | | | | | | Colon, | | |
| | | | | | | | | | Breast/ | | |
| | | | | | | | | | Ovarian | | |
| 632 | HCHPT49R | | | 94 | 303 | | | HCHPT49 | Colon, | | |
| | | | | | | | | | Breast/ | | |
| | | | | | | | | | Ovarian | | |
| 633 | HCRMG12R | | | 2 | 187 | | | HCRMG12 | Pancreas, | | |
| | | | | | | | | | Colon | | |
| 634 | HWLWE68R | | | 2 | 241 | | | HWLWE68 | Pancreas, | | |
| | | | | | | | | | Colon | | |
| 635 | HCHPF59R | | | 24 | 179 | | | HCHPF59 | Pancreas, | | |
| | | | | | | | | | Breast/ | | |
| | | | | | | | | | Ovarian | | |
| 636 | HS2IA81R | | | 90 | 551 | | | HS2IA81 | Pancreas, | | |
| | | | | | | | | | Colon | | |
| 637 | HCRNC17R | | | 11 | 400 | | | HCRNC17 | Pancreas, | | |
| | | | | | | | | | Colon | | |
| 638 | HISDJ39R | | | 14 | 406 | | | HISDJ39 | Pancreas, | | |
| | | | | | | | | | Colon | | |
| 639 | HWLEL43R | | | 2 | 337 | | | HWLEL43 | Pancreas, | | |
| | | | | | | | | | Colon | | |
| 640 | HASCG71R | | | 91 | 249 | | | HASCG71 | Lung, | | |
| | | | | | | | | | Colon, | | |
| | | | | | | | | | Breast/ | | |
| | | | | | | | | | Ovarian | | |
| 641 | HOEMO43R | | | 2 | 184 | | | HOEMO43 | Lung, | | |
| | | | | | | | | | Pancreas, | | |
| | | | | | | | | | Colon, | | |
| | | | | | | | | | Breast/ | | |
| | | | | | | | | | Ovarian | | |
| 642 | HRDFT95R | c-erb-B-2 precursor [Homo sapiens] | gi\|31198 | 151 | 231 | 76 | 82 | HRDFT95 | Pancreas, | | |
| | | >pir\|A24571\|A24571 protein-tyrosine kinase (EC | Colon | | | | | | | | |
| | | 2.7.1.112) erbB2 precursor - human | | | | | | | | | |
| | | >sp\|P04626\|ERB2_HUMAN ERBB-2 RECEPTOR | | | | | | | | | |
| | | PROTEIN-TYROSINE KINASE PRECURSOR (EC | | | | | | | | | |
| | | 2.7.1.112) (P185ERBB2) (NEU PROTO- | | | | | | | | | |
| | | ONCOGENE) (C-ERBB-2). Length | | | | | | | | | |
| 643 | HAGEP27R | C10 protein [Bos taurus] >pir\|A38464\|A38464 33K | gi\|163303 | 3 | 137 | 86 | 86 | HAGEP27 | Lung, | | |
| | | laminin receptor homolog - bovine Length = 295 | | | | | | | Pancreas, | | |
| | | | | | | | | | Colon, | | |
| | | | | | | | | | Breast/ | | |
| | | | | | | | | | Ovarian | | |
| 644 | HSYDG18R | calmodulin [Homo sapiens] >sp\|Q13942\|Q13942 | gi\|825635 | 3 | 422 | 100 | 100 | HSYDG18 | Lung, | | |
| | | CALMODULIN. >pir\|A56785\|A56785 calmodulin - | | | | | | | Pancreas, | | |
| | | pig (fragment) {SUB 80-130} >gi\|3243222 | | | | | | | Colon | | |
| | | (AF069912) calmodulin [Xiphias gladius] {SUB 80- | | | | | | | | | |
| | | 114} >pir\|E44101\|E44101 calmodulin, vasoactive | | | | | | | | | |
| | | intestinal peptide-binding prote | | | | | | | | | |
| 645 | HLJDZ15R | cathepsin C [Homo sapiens] >gi\|1947071 prepro | gi\|1006657 | 3 | 110 | 71 | 77 | HLJDZ15 | Lung, | | |
| | | dipeptidyl peptidase I [Homo sapiens] | | | | | | | Colon | | |
| | | >pir\|S66504\|S66504 dipeptidyl-peptidase I (EC | | | | | | | | | |
| | | 3.4.14.1) precursor - human | | | | | | | | | |
| | | >sp\|P53634\|CATC_HUMAN DIPEPTIDYL- | | | | | | | | | |
| | | PEPTIDASE I PRECURSOR (EC 3.4.14.1) (DPP-I) | | | | | | | | | |
| | | (CATHEPSIN C) (CATHE | | | | | | | | | |
| 646 | HAHDQ54R | cathepsin D [Homo sapiens] >gi\|29678 precursor | gi\|179948 | 2 | 103 | 100 | 100 | HAHDQ54 | Lung, | | |
| | | polypeptide (AA - 20 to 392) [Homo sapiens] | | | | | | | Pancreas | | |
| | | >gi\|181180 preprocathepsin D [Homo sapiens] | | | | | | | | | |
| | | >pir\|A25771\|KHHUD cathepsin D (EC 3.4.23.5) | | | | | | | | | |
| | | precursor - human >sp\|P07339\|CATD_HUMAN | | | | | | | | | |
| | | CATHEPSIN D PRECURSOR (EC 3.4.23.5). | | | | | | | | | |
| 647 | HTLHI18R | collagen alpha 2(VI) chain precursor, long splice | pir\|S05378\| | 2 | 481 | 89 | 89 | HTLHI18 | Lung, | | |
| | | form - human >gi\|179711 alpha-2 collagen type VI- | CGHU2A | | | | | | Pancreas | | |
| | | a′ [Homo sapiens] {SUB 590-1018} | | | | | | | | | |
| | | >gi\|291918 alpha-2 type VI collagen [Homo | | | | | | | | | |
| | | sapiens] {SUB 315-358} | | | | | | | | | |
| | | Length = 1018 | | | | | | | | | |
| 648 | HACAC47R | complement component C3 [Homo sapiens] | gi\|179665 | 1 | 315 | 79 | 80 | HACAC47 | Lung, | | |
| | | >pir\|A94065\|C3HU complement C3 precursor - | | | | | | | Pancreas, | | |
| | | human >sp\|P01024\|CO3_HUMAN | | | | | | | Breast/ | | |
| | | COMPLEMENT C3 PRECURSOR [CONTAINS: | | | | | | | Ovarian | | |
| | | C3A ANAPHYLATOXIN]. >gi\|181130 | | | | | | | | | |
| | | complement component C3 [Homo sapiens] | | | | | | | | | |
| | | {SUB 1-24} Length = 1663 | | | | | | | | | |
| 649 | HLQFY41R | complement component C3 [Homo sapiens] | gi\|179665 | 3 | 377 | 96 | 98 | HLQFY41 | Lung, | | |
| | | >pir\|A94065\|C3HU complement C3 precursor - | | | | | | | Pancreas, | | |
| | | human >sp\|P01024\|CO3_HUMAN | | | | | | | Colon, | | |
| | | COMPLEMENT C3 PRECURSOR [CONTAINS: C3A | | | | | | | Breast/ | | |
| | | ANAPHYLATOXIN]. >gi\|181130 complement | | | | | | | Ovarian | | |
| | | component C3 [Homo sapiens] {SUB 1-24} | | | | | | | | | |
| | | Length = 1663 | | | | | | | | | |
| 650 | HOFMO83R | cyclin G [Homo sapiens] >gi\|1236233 cyclin G1 | gnl\|PID\|d1012016 | 2 | 205 | 87 | 93 | HOFM083 | Pancreas, | | |
| | | [Homo sapiens] >gi\|1236913 cyclin G1 [Homo | | | | | | | Breast/ | | |
| | | sapiens] >pir\|G02401\|G02401 cyclin G1 - human | | | | | | | Ovarian | | |
| | | >sp\|P51959\|CG2G_HUMAN G2/MITOTIC- | | | | | | | | | |
| | | SPECIFIC CYCLIN G1. >gnl\|PID\|d1013694 cyclin | | | | | | | | | |
| | | G [Homo sapiens] {SUB 1-279} >gi\|1486361 c | | | | | | | | | |
| 651 | HFTDR22R | cytochrome b5, hepatic - brown bowler monkey | pir\|S07959\| | 136 | 357 | 100 | 100 | HFTDR22 | Pancreas, | | |
| | | (fragment) Length = 87 | S07959 | | | | | | Colon, | | |
| | | | | | | | | | Breast/ | | |
| | | | | | | | | | Ovarian | | |
| 652 | HPJCZ01R | cytochrome c oxidase II [Macaca fascicularis] | gi\|342255 | 2 | 163 | 44 | 50 | HPJCZ01 | Lung, | | |
| | | >pir\|A27420\|A27420 cytochrome-c oxidase (EC | | | | | | | Pancreas, | | |
| | | 1.9.3.1) chain II - crab-eating macaque | | | | | | | Colon | | |
| | | mitochondrion (SGC1) >sp\|P11948\|C0X2_MACFA | | | | | | | | | |
| | | CYTOCHROME C OXIDASE POLYPEPTIDE II | | | | | | | | | |
| | | (EC 1.9.3.1). Length = 227 | | | | | | | | | |
| 653 | HOEKC39R | cytochrome oxidase I [Homo sapiens] >gi\|506829 | gi\|13006 | 54 | 167 | 91 | 95 | HOEKC39 | Lung, | | |
| | | cytochrome oxidase subunit 1 [Homo sapiens] | | | | | | | Pancreas, | | |
| | | >pir\|A00463\|ODHU1 cytochrome-c oxidase (EC | | | | | | | Colon | | |
| | | 1.9.3.1) chain I - human mitochondrion (SGC1) | | | | | | | | | |
| | | >sp\|P00395\|COX1_HUMAN CYTOCHROME C | | | | | | | | | |
| | | OXIDASE POLYPEPTIDE I (EC 1.9.3.1). Leng | | | | | | | | | |
| 654 | HOELI24R | cytochrome oxidase subunit 3 [Homo sapiens] | gi\|2052365 | 29 | 166 | 97 | 97 | HOELI24 | Lung, | | |
| | | Length 260 | | | | | | | Pancreas, | | |
| | | | | | | | | | Colon | | |
| 655 | HODEI18R | cytochrome oxidase subunit II [Homo sapiens] | gi\|530069 | 1 | 180 | 69 | 72 | HODEI18 | Lung, | | |
| | | >gi\|530071 cytochrome oxidase subunit II [Homo | | | | | | | Pancreas, | | |
| | | sapiens] >gi\|530073 cytochrome oxidase subunit II | | | | | | | Colon | | |
| | | [Homo sapiens] >gi\|530077 cytochrome oxidase | | | | | | | | | |
| | | subunit II [Homo sapiens] >gi\|337187 cytochrome | | | | | | | | | |
| | | oxidase subunit II [ | | | | | | | | | |
| 656 | HOSNR06R | cytochrome oxidase subunit II [Homo sapiens] | gi\|530069 | 269 | 403 | 93 | 95 | HOSNR06 | Lung, | | |
| | | >gi\|530071 cytochrome oxidase subunit II [Homo | | | | | | | Pancreas | | |
| | | sapiens] >gi\|530073 cytochrome oxidase subunit II | | | | | | | | | |
| | | [Homo sapiens] >gi\|530077 cytochrome oxidase | | | | | | | | | |
| | | subunit II [Homo sapiens] >gi\|337187 cytochrome | | | | | | | | | |
| | | oxidase subunit II [ | | | | | | | | | |
| 657 | HCQDL20R | cytochrome P450 PCN3 [Homo sapiens] | gi\|181346 | 39 | 245 | 98 | 98 | HCQDL20 | Pancreas, | | |
| | | >pir\|A34101\|A34101 cytochrome P450 3A5 - human | | | | | | | Colon | | |
| | | >sp\|P20815\|CP35_HUMAN CYTOCHROME P450 | | | | | | | | | |
| | | 3A5 (EC 1.14.14.1) (CYPIIIA5) (P450-PCN3). | | | | | | | | | |
| | | >gi\|950342 cytochrome P450 [Homo sapiens] {SUB | | | | | | | | | |
| | | 1-24} Length = 502 | | | | | | | | | |
| 658 | HTOHI64R | cytokeratin 15 (AA 1-456) [Homo sapiens] | gi\|34071 | 149 | 253 | 89 | 89 | HTOHI64 | Prostate, | | |
| | | >pir\|S01069\|KRHU5 keratin 15. type I, cytoskeletal - | | | | | | | Breast/ | | |
| | | human >sp\|P19012\|K1CO_HUMAN KERATIN, | | | | | | | Ovarian | | |
| | | TYPE I CYTOSKELETAL 15 (CYTOKERATIN | | | | | | | | | |
| | | 15) (K15) (CK 15). Length = 456 | | | | | | | | | |
| 659 | HCHBR11R | cytokeratin 8 [Homo sapiens] Length = 483 | gi\|181400 | 3 | 380 | 55 | 57 | HCHBR11 | Lung, | | |
| | | | | | | | | | Pancreas, | | |
| | | | | | | | | | Colon, | | |
| | | | | | | | | | Breast/ | | |
| | | | | | | | | | Ovarian | | |
| 660 | HADBE77R | cytoplasmic chaperonin hTRiC5 [Homo sapiens] | gi\|609308 | 43 | 294 | 80 | 84 | HADBE77 | Lung, | | |
| | | Length = 201 | | | | | | | Pancreas, | | |
| | | | | | | | | | Colon, | | |
| | | | | | | | | | Breast/ | | |
| | | | | | | | | | Ovarian | | |
| 661 | HFKHD49R | D-beta-hydroxybutyrate dehydogenase [Rattus | gi\|930260 | 1 | 210 | 100 | 100 | HFKHD49 | Lung, | | |
| | | norvegicus] Length = 93 | | | | | | | Colon, | | |
| | | | | | | | | | Breast/ | | |
| | | | | | | | | | Ovarian | | |
| 662 | HOEMJ59R | decorin [Homo sapiens] >gi\|609452 decorin [Homo | gi\|181519 | 3 | 128 | 72 | 75 | HOEMJ59 | Lung, | | |
| | | sapiens] {SUB 1-70} Length = 347 | | | | | | | Colon | | |
| 663 | HTYNC43R | elongation factor 1-alpha 1 [Homo sapiens] | gi\|927065 | 2 | 217 | 92 | 94 | HTYNC43 | Lung, | | |
| | | >gi\|927067 longation factor 1-alpha 1 [Homo | | | | | | | Pancreas, | | |
| | | sapiens] >pir\|I59399\|I59399 oncogene PTI-1 - | | | | | | | Colon | | |
| | | human >sp\|Q16577\|Q16577 ONCOGENE. Length = | | | | | | | | | |
| | | 398 | | | | | | | | | |
| 664 | H6EAQ15R | elongation factor 2 [Homo sapiens] >gi\|31108 | gi\|31106 | 2 | 70 | 100 | 100 | H6EAQ15 | Lung, | | |
| | | human elongation factor 2 [Homo sapiens] | | | | | | | Pancreas, | | |
| | | >pir\|S18294\|EFHU2 translation elongation factor | | | | | | | Breast/ | | |
| | | eEF-2 - human >sp\|P13639\|EF2_HUMAN | | | | | | | Ovarian | | |
| | | ELONGATION FACTOR 2 (EF-2). >gi\|181969 | | | | | | | | | |
| | | elongation factor 2 [Homo sapiens] {SUB 501-858 | | | | | | | | | |
| 665 | HCFLM34R | elongation factor Tu [Mus musculus] | gi\|553907 | 48 | 308 | 94 | 95 | HCFLM34 | Lung, | | |
| | | >sp\|Q61511\|Q61511 EUKARYOTIC | | | | | | | Breast/ | | |
| | | TRANSLATION ELONGATION FACTOR 1 | | | | | | | Ovarian | | |
| | | ALPHA 1 (EEF-TU GENE ENCODING | | | | | | | | | |
| | | ELONGATION FACTOR TU, 5′ END) | | | | | | | | | |
| | | (FRAGMENT). Length = 108 | | | | | | | | | |
| 666 | HTTID16R | ENA-78 prepeptide [Homo sapiens] >gi\|607031 | gi\|684922 | 2 | 331 | 85 | 85 | HTTID16 | Pancreas, | | |
| | | neutrophil-activating peptide 78 [Homo sapiens] | | | | | | | Colon | | |
| | | >gi\|471243 ENA-78 gene product [Homo sapiens] | | | | | | | | | |
| | | >pir\|JC2433\|A55010 neutrophil-activating peptide | | | | | | | | | |
| | | ENA-78 - human >sp\|P42830\|EN78_HUMAN | | | | | | | | | |
| | | NEUTROPHIL ACTIVATING PROTEIN E | | | | | | | | | |
| 667 | HDPAI45R | endoglin [Homo sapiens] >pir\|S37628\|S37628 | gi\|402207 | 2 | 181 | 65 | 65 | HDPAI45 | Pancreas, | | |
| | | endoglin - human Length = 625 | | | | | | | Colon | | |
| 668 | HKIXL19R | epoxide hydrolase [Homo sapiens] >gi\|340390 | gi\|450271 | 1 | 348 | 100 | 100 | HKIXL19 | Lung, | | |
| | | epoxide hydrolase [Homo sapiens] >gi\|34543 | | | | | | | Pancreas, | | |
| | | epoxide hydrolase (AA 1-455) [Homo sapiens] | | | | | | | Colon | | |
| | | >gi\|458701 epoxide hydrolase [Homo sapiens] | | | | | | | | | |
| | | >pir\|A29939\|A29939 epoxide hydrolase (EC 3.3.2.3) | | | | | | | | | |
| | | 1, microsomal - human >sp\|P070 | | | | | | | | | |
| 669 | H2LAY52R | EWS gene product [Mus musculus] | gi\|488513 | 27 | 494 | 100 | 100 | H2LAY52 | Lung, | | |
| | | >pir\|A55726\|A55726 RNA-binding protein Ews - | | | | | | | Pancreas, | | |
| | | mouse >sp \|Q61545\|EWS_MOUSE RNA- | | | | | | | Colon, | | |
| | | BINDING PROTEIN EWS. Length = 655 | | | | | | | Breast/ | | |
| | | | | | | | | | Ovarian | | |
| 670 | HAJRB09R | FAST kinase [Homo sapiens] >pir\|I37386\|I37386 | gi\|1006659 | 19 | 324 | 77 | 77 | HAJRB09 | Pancreas, | | |
| | | FAST kinase - human >sp\|Q14296\|Q14296 FAST | | | | | | | Colon | | |
| | | KINASE. Length = 549 | | | | | | | | | |
| 671 | HAPNI86R | G9a [Homo sapiens] >pir\|S30385\|S30385 G9a | gi\|287865 | 3 | 419 | 97 | 97 | HAPNI86 | Lung, | | |
| | | protein - human >sp\|Q14349\|Q14349 G9A | | | | | | | Colon | | |
| | | PROTEIN CONTAINING ANKYRIN-LIKE | | | | | | | | | |
| | | REPEATS. Length = 1001 | | | | | | | | | |
| 672 | HCEVB92R | glutamate dehydrogenase [Homo sapiens] | gi\|183056 | 2 | 217 | 78 | 81 | HCEVB92 | Pancreas, | | |
| | | >sp\|Q14400\|Q14400 GLUTAMATE | | | | | | | Colon | | |
| | | DEHYDROGENASE (FRAGMENT). Length = 258 | | | | | | | | | |
| 673 | HAPRJ22R | glutamate-ammonia ligase [Homo sapiens] | gi\|131831 | 168 | 431 | 100 | 100 | HAPRJ22 | Lung, | | |
| | | >pir\|S18455\|AJHUQ glutamate-ammonia ligase | | | | | | | Pancreas, | | |
| | | (EC 6.3.1.2) - human Length = 373 | | | | | | | Prostate, | | |
| | | | | | | | | | Colon, | | |
| | | | | | | | | | Breast/ | | |
| | | | | | | | | | Ovarian | | |
| 674 | HCRMZ32R | glutamine:fructose-6-phosphate amidotransferase | gi\|183082 | 2 | 316 | 91 | 91 | HCRMZ32 | Pancreas, | | |
| | | [Homo sapiens] >pir\|A45055\|A45055 glutamine- | | | | | | | Colon, | | |
| | | fructose-6-phosphate transaminase (isomerizing) | | | | | | | Breast/ | | |
| | | (EC 2.6.1.16) - human >sp\|Q06210\| | | | | | | | Ovarian | | |
| | | GFAT_HUMAN GLUCOSAMINE-FRUCTOSE-6- | | | | | | | | | |
| | | PHOSPHATE AMINOTRANSFERASE [ | | | | | | | | | |
| | | ISOMERIZING] (EC 2 | | | | | | | | | |
| 675 | HBMVM42R | guanine nucleotide regulatory protein [Homo | gi\|484102 | 1 | 363 | 84 | 87 | HBMVM42 | Colon, | | |
| | | sapiens] >gi\|3041860 (AC004534) guanine | | | | | | | Breast/ | | |
| | | nucleotide regulatory protein [Homo sapiens] | | | | | | | Ovarian | | |
| | | >pir\|I38402\|I38402 guanine nucleotide regulatory | | | | | | | | | |
| | | protein - human >sp\|Q12774\|Q12774 GUANINE | | | | | | | | | |
| | | NUCLEOTIDE REGULATORY PROTEIN. Leng | | | | | | | | | |
| 676 | HADGE45R | guanine nucleotide-binding protein G-s-alpha-4 | gi\|386746 | 2 | 439 | 96 | 96 | HADGE45 | Lung, | | |
| | | [Homo sapiens] >gi\|31913 alpha-S1 (AA 1-380) | | | | | | | Pancreas, | | |
| | | [Homo sapiens] >pir\|C31927\|RGHUA1 GTP- | | | | | | | Colon | | |
| | | binding regulatory protein Gs alpha chain (adenylate | | | | | | | | | |
| | | cyclase-stimulating), splice form 4 - human | | | | | | | | | |
| | | Length = 380 | | | | | | | | | |
| 677 | HTXPN11R | heat shock-induced protein [Homo sapiens] | gi\|188492 | 3 | 413 | 94 | 98 | HTXPN11 | Lung, | | |
| | | >pir\|B45871\|B45871 dnaK-type molecular | | | | | | | Pancreas, | | |
| | | chaperone HSP70-Hom - human | | | | | | | Colon | | |
| | | >sp\|P34931\|HS7H_HUMAN HEAT SHOCK 70 | | | | | | | | | |
| | | KD PROTEIN 1-HOM (HSP70-HOM). | | | | | | | | | |
| | | Length = 641 | | | | | | | | | |
| 678 | HCDBN37R | heterogeneous nuclear ribonucleoprotein C-like | pir\|A44192\| | 1 | 300 | 96 | 96 | HCDBN37 | Colon, | | |
| | | protein - human Length = 328 | A44192 | | | | | | Breast/ | | |
| | | | | | | | | | Ovarian | | |
| 679 | HABGC02R | HLA-DR-beta-B [Homo sapiens] Length = 266 | gi\|490048 | 3 | 389 | 89 | 94 | HABGC02 | Lung, | | |
| | | | | | | | | | Colon | | |
| 680 | HNTSA70R | HsMcm6 [Homo sapiens] | gnl\|PID\|d1013380 | 3 | 341 | 69 | 72 | HNTSA70 | Lung, | | |
| | | >sp\|Q14566\|MCM6_HUMAN DNA | | | | | | | Colon | | |
| | | REPLICATION LICENSING FACTOR MCM6 | | | | | | | | | |
| | | (P105MCM). Length = 821 | | | | | | | | | |
| 681 | HDTKP24R | hypothetical 18K protein (rRNA) - goldfish | pir\|JC1348\| | 397 | 492 | 64 | 67 | HDTKP24 | Lung, | | |
| | | mitochondrion (SGC1) Length = 166 | JC1348 | | | | | | Pancreas, | | |
| | | | | | | | | | Colon | | |
| 682 | HODEI14R | hypothetical 18K protein (rRNA) - goldfish | pir\|JC1348\| | 164 | 247 | 62 | 68 | HODEII4 | Lung, | | |
| | | mitochondrion (SGC1) Length = 166 | JC1348 | | | | | | Pancreas, | | |
| | | | | | | | | | Colon | | |
| 683 | HOELC42R | IGF-BP 4 [Homo sapiens] >gnl\|PID\|e1227579 | gi\|184816 | 13 | 288 | 83 | 83 | HOELC42 | Pancreas, | | |
| | | insulin-like growth factor binding protein 4 [Homo | | | | | | | Colon | | |
| | | sapiens] >pir\|B37252\|B37252 insulin-like growth | | | | | | | | | |
| | | factor-binding protein 4 precursor - human | | | | | | | | | |
| | | >sp\|P22692\|IBP4_HUMAN INSULIN-LIKE | | | | | | | | | |
| | | GROWTH FACTOR BINDING PROTEIN 4 PREC | | | | | | | | | |
| 684 | HWAFL44R | immunoglobulin heavy chain [Homo sapiens] | gi\|567121 | 2 | 463 | 83 | 90 | HWAFL44 | Lung, | | |
| | | >pir\|D36005\|D36005 Ig heavy chain V region | | | | | | | Colon | | |
| | | (M43) - human {SUB 38-156} Length = 156 | | | | | | | | | |
| 685 | HABGF46R | immunoglobulin light chain variable region [Homo | gi\|1136555 | 42 | 446 | 71 | 85 | HABGF46 | Lung, | | |
| | | sapiens] >gi\|2970534 (AF049692) immunoglobulin | | | | | | | Pancreas, | | |
| | | kappa light chain [Homo sapiens] {SUB 3-106} | | | | | | | Colon, | | |
| | | Length = 143 | | | | | | | Breast/ | | |
| | | | | | | | | | Ovarian | | |
| 686 | HOELC15R | insulin-like growth factor-binding protein [Homo | gi\|183116 | 8 | 424 | 96 | 96 | HOELC15 | Pancreas, | | |
| | | sapiens] >gi\|386791 growth factor-binding protein-3 | | | | | | | Colon, | | |
| | | [Homo sapiens] >gi\|398164 insulin-like growth | | | | | | | Breast/ | | |
| | | factor binding protein 3 [Homo sapiens] | | | | | | | Ovarian | | |
| | | >pir\|A36578\|IOHU3 insulin-like growth factor- | | | | | | | | | |
| | | binding protein 3 precu | | | | | | | | | |
| 687 | H2LAR26R | keratin 18 [Homo sapiens] >gi\|307081 keratin 18 | gi\|386844 | 72 | 476 | 97 | 98 | H2LAR26 | Colon, | | |
| | | precursor [Homo sapiens] >gi\|34037 cytokeratin 18 | | | | | | | Breast/ | | |
| | | [Homo sapiens] >pir\|S05481\|S05481 keratin 18, | | | | | | | Ovarian | | |
| | | type I, cytoskeletal - human >sp\|P05783\| | | | | | | | | | |
| | | K1CR_HUMAN KERATIN, TYPE I | | | | | | | | | |
| | | CYTOSKELETAL 18 (CYTOKERATIN 18) (K18) | | | | | | | | | |
| | | (CK 1 | | | | | | | | | |
| 688 | H2LAV85R | Ku (p70/p80) subunit [Homo sapiens] >gi\|307093 | gi\|307094 | 67 | 462 | 97 | 98 | H2LAV85 | Lung, | | |
| | | Ku antigen [Homo sapiens] >pir\|A35051\|A32626 | | | | | | | Pancreas | | |
| | | Ku antigen 80K chain - human | | | | | | | | | |
| | | >sp\|P13010\|KU86_HUMAN ATP-DEPENDENT | | | | | | | | | |
| | | DNA HELICASE II, 86 KD SUBUNIT (LUPUS | | | | | | | | | |
| | | KU AUTOANTIGEN PROTEIN P86) (86 KD | | | | | | | | | |
| | | SUBUNIT OF KU ANTIGEN) (T | | | | | | | | | |
| 689 | HBSDC92R | l-caldesmon II [Homo sapiens] Length = 532 | gnl\|PID\|d1015132 | 56 | 337 | 64 | 76 | HBSDC92 | Lung, | | |
| | | | | | | | | | Breast/ | | |
| | | | | | | | | | Ovarian | | |
| 690 | HUTHN01R | L6 [Homo sapiens] >pir\|A42926\|A42926 L6 surface | gi\|186804 | 87 | 545 | 91 | 91 | HUTHN01 | Lung, | | |
| | | protein - human Length = 202 | | | | | | | Pancreas, | | |
| | | | | | | | | | Colon, | | |
| | | | | | | | | | Breast/ | | |
| | | | | | | | | | Ovarian | | |
| 691 | H2LAW03R | lactate dehydrogenase B [Homo sapiens] >gi\|34329 | gnl\|PID\|e223241 | 111 | 536 | 99 | 100 | H2LAW03 | Lung, | | |
| | | lactate dehydrogenase B (AA 1-334) [Homo | | | | | | | Pancreas | | |
| | | sapiens] >pir\|S02795\|DEHULH L-lactate | | | | | | | | | |
| | | dehydrogenase (EC 1.1.1.27) chain H - human | | | | | | | | | |
| | | >sp\|P07195\|LDHH_HUMAN L-LACTATE | | | | | | | | | |
| | | DEHYDROGENASE H CHAIN (EC 1.1.1.27) | | | | | | | | | |
| | | (LDH-B). {SUB | | | | | | | | | |
| 692 | HOEMO60R | lactate dehydrogenase-A [Homo sapiens] >gi\|34313 | gi\|780261 | 1 | 201 | 59 | 59 | HOEMO60 | Pancreas, | | |
| | | lactate dehydrogenase-A [Homo sapiens] | | | | | | | Breast/ | | |
| | | >pir\|A00347\|DEHULM L-lactate dehydrogenase | | | | | | | Ovarian | | |
| | | (EC 1.1.1.27) chain M - human | | | | | | | | | |
| | | >sp\|P00338\|LDHM_HUMAN L-LACTATE | | | | | | | | | |
| | | DEHYDROGENASE M CHAIN (EC 1.1.1.27) | | | | | | | | | |
| | | (LDH-A). {SUB 2-332} Lengt | | | | | | | | | |
| 693 | HKAHJ14R | | | 1 | 216 | | | HKAHJ14 | Pancreas, | | |
| | | | | | | | | | Colon | | |
| 694 | HOHEA39R | latent transforming growth factor-beta-binding | pir\|A55494\| | 1 | 240 | 85 | 86 | HOHEA39 | Pancreas, | | |
| | | protein - human Length = 1820 | A55494 | | | | | | Breast/ | | |
| | | | | | | | | | Ovarian | | |
| 695 | HOELF72R | lumican [Homo sapiens] Length = 338 | gi\|699577 | 58 | 468 | 97 | 97 | HOELF72 | Pancreas, | | |
| | | | | | | | | | Colon | | |
| 696 | HAPNX59R | M130 antigen [Homo sapiens] >pir\|I38003\|S36077 | gi\|312142 | 1 | 432 | 85 | 88 | HAPNX59 | Lung, | | |
| | | M130 antigen - human >sp\|Q07898\|Q07898 M130 | | | | | | | Colon | | |
| | | ANTIGEN PRECURSOR. Length = 1116 | | | | | | | | | |
| 697 | HBJJS17R | methionine aminopeptidase [Homo sapiens] | gi\|903982 | 1 | 255 | 100 | 100 | HBJJS17 | Lung, | | |
| | | >gi\|687243 eIF-2-associated p67 homolog [Homo | | | | | | | Pancreas | | |
| | | sapiens] >pir\|S52112\|DPHUM2 methionyl | | | | | | | | | |
| | | aminopeptidase (EC 3.4.11.18) 2- human | | | | | | | | | |
| | | >sp\|P50579\|AMP2_HUMAN METHIONINE | | | | | | | | | |
| | | AMINOPEPTIDASE 2 (EC 3.4.11.18) (METAP 2) | | | | | | | | | |
| | | (PEPTIDASE M 2) | | | | | | | | | |
| 698 | HATDU61R | midkine [Homo sapiens] >gi\|188571 retinoic acid | gi\|182651 | 1 | 108 | 67 | 67 | HATDU61 | Pancreas, | | |
| | | inducible factor [Homo sapiens] >gi\|35087 neurite | | | | | | | Colon | | |
| | | outgrowth-promoting protein [Homo sapiens] | | | | | | | | | |
| | | >gnl\|PID\|d1001932 midkine [Homo sapiens] | | | | | | | | | |
| | | >pir\|JH0385\|JH0385 midkine precursor - human | | | | | | | | | |
| | | >sp\|P21741\|MK_HUMAN MIDKINE | | | | | | | | | |
| 699 | HCWHT65R | mitochondrial intermediate peptidase precursor | gi\|1763642 | 1 | 432 | 74 | 77 | HCWHT65 | Prostate, | | |
| | | [Homo sapiens] >sp\|Q99797\|Q99797 | | | | | | | Colon | | |
| | | MITOCHONDRIAL INTERMEDIATE | | | | | | | | | |
| | | PEPTIDASE PRECURSOR (EC 3.4.24.59). | | | | | | | | | |
| | | Length = 713 | | | | | | | | | |
| 700 | H2CBN02R | mitochondrial matrix protein [Homo sapiens] | gi\|190127 | 1 | 435 | 99 | 99 | H2CBN02 | Pancreas, | | |
| | | >pir\|A32800\|A32800 chaperonin GroEL precursor - | | | | | | | Colon | | |
| | | human >sp\|P10809\|P60_HUMAN | | | | | | | | | |
| | | MITOCHONDRIAL MATRIX PROTEIN P1 | | | | | | | | | |
| | | PRECURSOR (P60 LYMPHOCYTE PROTEIN) | | | | | | | | | |
| | | (60 KD CHAPERONIN) (HEAT SHOCK | | | | | | | | | |
| | | PROTEIN 60) (HSP-60) (PROTEIN CPN60) { | | | | | | | | | |
| 701 | H2CBV68R | mitochondrial matrix protein [Homo sapiens] | gi\|190127 | 2 | 406 | 100 | 100 | H2CBV68 | Colon, | | |
| | | >pir\|A32800\|A32800 chaperonin GroEL precursor - | | | | | | | Breast/ | | |
| | | human >sp\|P10809\|P60_HUMAN | | | | | | | Ovarian | | |
| | | MITOCHONDRIAL MATRIX PROTEIN P1 | | | | | | | | | |
| | | PRECURSOR (P60 LYMPHOCYTE PROTEIN) | | | | | | | | | |
| | | (60 KD CHAPERONIN) (HEAT SHOCK | | | | | | | | | |
| | | PROTEIN 60) (HSP-60) (PROTEIN CPN60) { | | | | | | | | | |
| 702 | H6EDK07R | Mr 110,000 antigen [Homo sapiens] | gnl\|PID\|d1011683 | 1 | 252 | 90 | 90 | H6EDK07 | Lung, | | |
| | | >pir\|I52703\|I52703 42K membrane glycoprotein - | | | | | | | Breast/ | | |
| | | human >sp\|Q16186\|G100_HUMAN 110 KD CELL | | | | | | | Ovarian | | |
| | | MEMBRANE GLYCOPROTEIN Length = 407 { | | | | | | | | | |
| 703 | HACAH10R | NADH dehydrogenase subunit 2, ND2 [human, | bbs\|75898 | 1 | 66 | 89 | 96 | HACAH10 | Lung, | | |
| | | brain, Peptide Mitochondrial Partial Mutant, 67 aa] | | | | | | | Pancreas, | | |
| | | [Homo sapiens] >sp\|Q36734\|Q36734 NADH | | | | | | | Colon | | |
| | | DEHYDROGENASE SUBUNIT 2 (FRAGMENT). | | | | | | | | | |
| | | Length = 67 | | | | | | | | | |
| 704 | HCCMC56R | NADH-UBIQUINONE OXIDOREDUCTASE B18 | sp\|P17568\| | 16 | 351 | 83 | 83 | HCCMC56 | Lung, | | |
| | | SUBUNIT (EC 1.6.5.3) (EC 1.6.99.3) (COMPLEX | NB8M_HUMAN | | | | | | Colon, | | |
| | | I-B18) (CI-B18) (CELL ADHESION PROTEIN | | | | | | | Breast/ | | |
| | | SQM1). Length = 134 | | | | | | | Ovarian | | |
| 705 | H2CBN54R | NADH-ubiquinone oxidoreductase B22 subunit {C- | bbs\|178894 | 2 | 427 | 99 | 99 | H2CBN54 | Pancreas, | | |
| | | terminal) [human, placenta, Peptide Mitochondrial | | | | | | | Colon | | |
| | | Partial, 179 aa] [Homo sapiens] Length = 179 | | | | | | | | | |
| 706 | HMCGL12R | NMB gene product [Homo sapiens] | gi\|666043 | 96 | 389 | 76 | 80 | HMCGL12 | Lung, | | |
| | | >pir\|I38065\|I38065 gene NMB protein - human | | | | | | | Pancreas | | |
| | | >sp\|Q14956\|NMB_HUMAN PUTATIVE | | | | | | | | | |
| | | TRANSMEMBRANE PROTEIN NMB | | | | | | | | | |
| | | PRECURSOR. Length = 560 | | | | | | | | | |
| 707 | HWHPX50R | nucleolar protein [Mus musculus] | gi\|200011 | 1 | 414 | 87 | 87 | HWHPX50 | Lung, | | |
| | | >pir\|I52858\|I52858 nucleolar protein - mouse | | | | | | | Pancreas, | | |
| | | >sp\|Q61937\|NPM_MOUSE NUCLEOPHOSMIN | | | | | | | Colon, | | |
| | | (NPM) (NUCLEOLAR PHOSPHOPROTEIN B23) | | | | | | | Breast/ | | |
| | | (NUMATRIN) (NUCLEOLAR PROTEIN NO38). | | | | | | | Ovarian | | |
| | | Length = 292 | | | | | | | | | |
| 708 | HAPQD84R | | | 115 | 267 | | | HAPQD84 | Lung, | | |
| | | | | | | | | | Pancreas, | | |
| | | | | | | | | | Colon, | | |
| | | | | | | | | | Breast/ | | |
| | | | | | | | | | Ovarian | | |
| 709 | HLIBN66R | | | 1 | 219 | | | HLIBN66 | Lung, | | |
| | | | | | | | | | Pancreas | | |
| 710 | HE2BD84R | OSF-2p1 [Homo sapiens] >pir\|S36111\|S36111 | gnl\|PID\|d1003341 | 2 | 394 | 77 | 81 | HE2BD84 | Pancreas, | | |
| | | osteoblast-specific factor 2 - human | | | | | | | Colon, | | |
| | | >sp\|Q15064\|Q15064 OSF-2P1. Length = 779 | | | | | | | Breast/ | | |
| | | | | | | | | | Ovarian | | |
| 711 | HLQFY45R | pancreatitis-associated protein [Homo sapiens] | gi\|482909 | 57 | 374 | 60 | 66 | HLQFY45 | Pancreas, | | |
| | | >gi\|312807 preprotein [Homo sapiens] >bbs\|121222 | | | | | | | Colon | | |
| | | PAP-H= pancreatitis-associated protein [human, | | | | | | | | | |
| | | pancreas, Peptide, 175 aa] [Homo sapiens] | | | | | | | | | |
| | | >gnl\|PID\|d1003233 PAP homologous protein [Homo | | | | | | | | | |
| | | sapiens] >pir\|A49616\|A49 | | | | | | | | | |
| 712 | HAMGQ78R | phosphate carrier isoform A (alternatively spliced, | pir\|A53737\| | 2 | 352 | 82 | 82 | HAMGQ78 | Lung, | | |
| | | exon IIIA) - human >sp\|Q00325\|MPCP_HUMAN | A53737 | | | | | | Colon | | |
| | | MITOCHONDRIAL PHOSPHATE CARRIER | | | | | | | | | |
| | | PROTEIN PRECURSOR. Length = 362 | | | | | | | | | |
| 713 | HODEV64R | poly(A)-binding protein [Homo sapiens] | gi\|1562511 | 1 | 492 | 97 | 98 | HODEV64 | Lung, | | |
| | | >gi\|1562511 poly(A)-binding protein [Homo | | | | | | | Pancreas | | |
| | | sapiens] >sp\|P11940\|PAB1_HUMAN | | | | | | | | | |
| | | POLYADENYLATE-BINDING PROTEIN 1 | | | | | | | | | |
| | | (POLY(A) BINDING PROTEIN 1) (PABP 1). | | | | | | | | | |
| | | Length = 636 | | | | | | | | | |
| 714 | H2CBD48R | precursor polypeptide (AA - 21 to 782) [Homo | gi\|37261 | 2 | 499 | 95 | 97 | H2CBD48 | Pancreas, | | |
| | | sapiens] >pir\|A35954\|A35954 endoplasmin | | | | | | | Colon | | |
| | | precursor - human >sp\|P14625\|ENPL_HUMAN | | | | | | | | | |
| | | ENDOPLASMIN PRECURSOR (94 KD | | | | | | | | | |
| | | GLUCOSE-REGULATED PROTEIN) (GRP94) | | | | | | | | | |
| | | (GP96 HOMOLOG) (TUMOR REJECTION | | | | | | | | | |
| | | ANTIGEN 1). Length = 803 | | | | | | | | | |
| 715 | HCCMA82R | procarboxypeptidase B [Homo sapiens] | gi\|189625 | 3 | 383 | 94 | 94 | HCCMA82 | Pancreas, | | |
| | | >pir\|A42332\|A42332 carboxypeptidase B (EC | | | | | | | Colon | | |
| | | 3.4.17.2) precursor, pancreatic - human Length = | | | | | | | | | |
| | | 416 | | | | | | | | | |
| 716 | HOEMK78R | prostacyclin-stimulating factor, PGI2-stimulating | bbs\|161346 | 3 | 329 | 95 | 95 | HOEMK78 | Lung, | | |
| | | factor, PSF [human, cultured diploid fibroblast cells, | | | | | | | Pancreas | | |
| | | Peptide, 282 aa] [Homo sapiens] | | | | | | | | | |
| | | >pir\|S50031\|S50031 prostacyclin-stimulating | | | | | | | | | |
| | | factor - human >sp\|Q16270\|Q16270 | | | | | | | | | |
| | | PROSTACYCLIN-STIMULATING FACTOR. | | | | | | | | | |
| | | Length = | | | | | | | | | |
| 717 | H2CBD13R | proteasome subunit C9 [Homo sapiens] | gnl\|PID\|d1001118 | 156 | 461 | 100 | 100 | H2CBD13 | Lung, | | |
| | | >pir\|S15972\|SNHUC9 multicatalytic endopeptidase | | | | | | | Pancreas, | | |
| | | complex (EC 3.4.99.46) chain C9 - human | | | | | | | Prostate, | | |
| | | >sp\|P25789\|PRC9_HUMAN PROTEASOME | | | | | | | Colon, | | |
| | | COMPONENT C9 (EC 3.4,99.46) (MACROPAIN | | | | | | | Breast/ | | |
| | | SUBUNIT C9) (MULTICATALYTIC | | | | | | | Ovarian | | |
| | | ENDOPEPTIDASE COMPLEX SUBUNIT | | | | | | | | | |
| 718 | HCFMU61R | protein-tyrosine kinase (EC 2.7.1.112) ZAP-70 - | pir\|A44266\| | 1 | 477 | 98 | 98 | HCFMU61 | Pancreas, | | |
| | | human Length = 619 | A44266 | | | | | | Colon | | |
| 719 | HOSNE94R | proteoglycan core protein [Homo sapiens] | gi\|181170 | 2 | 466 | 85 | 85 | HOSNE94 | Lung, | | |
| | | >pir\|A45016\|NBHUC8 decorin precursor - human | | | | | | | Pancreas | | |
| | | >sp\|P07585\|PGS2_HUMAN BONE | | | | | | | | | |
| | | PROTEOGLYCAN II PRECURSOR (PG-S2) | | | | | | | | | |
| | | (DECORIN) (PG40). >gi\|1161226 decorin [Rattus | | | | | | | | | |
| | | norvegicus] {SUB 204-299} Length = 359 | | | | | | | | | |
| 720 | HCROZ08R | putative precursor (AA 1-304) [Homo sapiens] | gi\|37599 | 3 | 218 | 100 | 100 | HCROZ08 | Lung, | | |
| | | >gnl\|PID\|e224276 uracil-DNA-glycosylase, UNG1 | | | | | | | Pancreas, | | |
| | | [Homo sapiens] >pir\|S05964\|A60472 uracil-DNA | | | | | | | Colon | | |
| | | glycosylase (EC 3.-.-.-) precursor - human | | | | | | | | | |
| | | >gnl\|PID\|e1296296 MITOCHONDRIAL | | | | | | | | | |
| | | LOCALIZATION PEPTIDE [unidentified] {SUB | | | | | | | | | |
| | | 1-3 | | | | | | | | | |
| 721 | HHBEF47R | pyruvate dehydrogenase E1-alpha precursor [Homo | gi\|387011 | 1 | 330 | 88 | 88 | HHBEF47 | Colon, | | |
| | | sapiens] >pir\|A60225\|A60225 pyruvate | | | | | | | Breast/ | | |
| | | dehydrogenase (lipoamide) (EC 1.2.4.1) alpha | | | | | | | Ovarian | | |
| | | chain - bovine (fragment) {SUB 54-74} | | | | | | | | | |
| | | Length = 414 | | | | | | | | | |
| 722 | HTXPI31R | pyruvate kinase M2 [Sus scrofa] | gi\|972104 | 2 | 286 | 84 | 85 | HTXPI31 | Pancreas, | | |
| | | >sp\|Q29582\|Q29552 PYRUVATE KINASE M2 | | | | | | | Breast/ | | |
| | | (EC 2.7.1.40) (PHOSPHOENOLPYRUVATE | | | | | | | Ovarian | | |
| | | KINASE) (PHOSPHOENOL TRANS- | | | | | | | | | |
| | | PHOSPHORYLASE) (FRAGMENT). | | | | | | | | | |
| | | Length = 108 | | | | | | | | | |
| 723 | HOEKC30R | rhoC coding region (AA 1-193) [Homo sapiens) | gi\|36034 | 2 | 151 | 94 | 94 | HOEKC30 | Lung, | | |
| | | >gi\|407699 GTPase [Homo sapiens] | | | | | | | Pancreas, | | |
| | | >pir\|S01029\|TVHURC GTP-binding protein rhoC - | | | | | | | Breast/ | | |
| | | human Length = 193 | | | | | | | Ovarian | | |
| 724 | HOSNR67R | ribosmal protein small subunit [Homo sapiens] | gi\|306553 | 1 | 483 | 97 | 98 | HOSNR67 | Lung, | | |
| | | Length = 264 | | | | | | | Pancreas | | |
| 725 | H2LAV92R | ribosomal protein [Homo sapiens] >gi\|57078 | gi\|407423 | 13 | 351 | 72 | 72 | H2LAV92 | Lung, | | |
| | | ribosomal protein L38 [Rattus rattus] | | | | | | | Pancreas, | | |
| | | >pir\|S15658\|R5RT38 ribosomal protein L38 - rat | | | | | | | Prostate, | | |
| | | >pir\|S38385\|S38385 ribosomal protein L38 - human | | | | | | | Colon, | | |
| | | >gnl\|PID\|d1026783 (AB007185) ribosomal protein | | | | | | | Breast/ | | |
| | | L38 [Homo sapiens] {SUB 34-70} | | | | | | | Ovarian | | |
| 726 | H2LAO74R | ribosomal protein L10 [Homo sapiens] | gi\|414587 | 359 | 502 | 83 | 83 | H2LA074 | Lung, | | |
| | | >sp\|D1026771\|D1026771 RIBOSOMAL PROTEIN | | | | | | | Pancreas, | | |
| | | L15 (FRAGMENT). {SUB 16-57} Length = 205 | | | | | | | Colon, | | |
| | | | | | | | | | Breast/ | | |
| | | | | | | | | | Ovarian | | |
| 727 | HKMMF85R | ribosomal protein L18a [Homo sapiens] >gi\|3702270 | gi\|401845 | 1 | 360 | 96 | 96 | HKMMF85 | Lung, | | |
| | | (AC005796) ribosomal protein L18a [Homo sapiens] | | | | | | | Breast/ | | |
| | | >gnl\|PID\|d1029536 (AB007175) ribosomal protein | | | | | | | Ovarian | | |
| | | L18a [Homo sapiens] {SUB 111-176} | | | | | | | | | |
| | | Length = 176 | | | | | | | | | |
| 728 | HCLBZ27R | ribosomal protein L19 [Homo sapiens] >bbs\|127872 | gi\|36128 | 19 | 273 | 93 | 98 | HCLBZ27 | Lung, | | |
| | | ribosomal protein L19 [human, breast cancer cell | | | | | | | Pancreas, | | |
| | | line, MCF-7, Peptide, 196 aa] [Homo sapiens] | | | | | | | Colon | | |
| | | >gi\|206726 ribosomal protein L19 [Rattus | | | | | | | | | |
| | | norvegicus] >gnl\|PID\|e218038 ribosomal protein | | | | | | | | | |
| | | L19 [Rattus norvegicus] | | | | | | | | | |
| 729 | H2LAV11R | ribosomal protein L21 [Homo sapiens] >gi\|984143 | gi\|550015 | 126 | 530 | 99 | 99 | H2LAV11 | Lung, | | |
| | | ribosomal protein L21 [Homo sapiens] | | | | | | | Pancreas, | | |
| | | >pir\|S55913\|S55913 ribosomal protein L21, | | | | | | | Colon | | |
| | | cytosolic - human >sp\|D1026774\|D1026774 | | | | | | | | | |
| | | RIBOSOMAL PROTEIN L21 (FRAGMENT). | | | | | | | | | |
| | | {SUB 124-154} Length = 160 | | | | | | | | | |
| 730 | HBAGP60R | ribosomal protein L27 [Homo sapiens] >gi\|3115335 | gi\|388769 | 161 | 373 | 66 | 70 | HBAGP60 | Pancreas, | | |
| | | ribosomal protein L27 [Homo sapiensi >gi\|57694 | | | | | | | Colon | | |
| | | ribosomal protein L27 (AA 1-136) [Rattus | | | | | | | | | |
| | | norvegicus] >gi\|62981 ribosomal protein L27 | | | | | | | | | |
| | | [Gallus gallus] >pir\|S00401\|R5RT27 | | | | | | | | | |
| | | ribosomal protein L27, cytosolic - ra | | | | | | | | | |
| 731 | HOEMJ56R | ribosomal protein L28 [Homo sapiens] | gi\|550019 | 3 | 206 | 94 | 94 | HOEMJ56 | Lung, | | |
| | | >pir\|S55915\|S55915 ribosomal protein L28 - human | | | | | | | Colon, | | |
| | | Length = 137 | | | | | | | Breast/ | | |
| | | | | | | | | | Ovarian | | |
| 732 | HA5AF77R | ribosomal protein L31 [Sus scrofa] >gi\|36130 | gnl\|PID\|e276436 | 1 | 381 | 82 | 82 | HA5AF77 | Lung, | | |
| | | ribosomal protein L31 (AA 1-125) [Homo sapiens] | | | | | | | Prostate, | | |
| | | >gi\|57115 ribosomal protein L31 (AA 1-125) | | | | | | | Colon, | | |
| | | [Rattus norvegicus] >pir\|S05576\|R5HU31 ribosomal | | | | | | | Breast/ | | |
| | | protein L31 - human >pir\|A26417\|R5RT31 | | | | | | | Ovarian | | |
| | | ribosomal protein L31 - rat >gn | | | | | | | | | |
| 733 | H2MAC95R | ribosomal protein L37 [Homo sapiens] >bbs\|172744 | gi\|292441 | 67 | 411 | 79 | 79 | H2MAC95 | Lung, | | |
| | | ribosomal protein L37 {C2—C2 zinc-finger-like) | | | | | | | Colon, | | |
| | | [human, HeLa cells, Peptide, 97 aa] [Homo sapiens] | | | | | | | Breast/ | | |
| | | >gnl\|PID\|d1005426 ribosomal protein L37 [Homo | | | | | | | Ovarian | | |
| | | sapiens] >gi\|57121 ribosomal protein L37 | | | | | | | | | |
| | | [Rattus norvegicus] > | | | | | | | | | |
| 734 | HDPLP40R | ribosomal protein L37 [Homo sapiens] >bbs\|172744 | gi\|292441 | 1 | 363 | 100 | 100 | HDPLP40 | Lung, | | |
| | | ribosomal protein L37 {C2—C2 zinc-finger-like) | | | | | | | Pancreas | | |
| | | [human, HeLa cells, Peptide, 97 aa] [Homo sapiens] | | | | | | | Breast/ | | |
| | | >gnl\|PID\|d1005426 ribosomal protein L37 [Homo | | | | | | | Ovarian | | |
| | | sapiens] >gi\|5712l ribosomal protein L37 [Rattus | | | | | | | | | |
| | | norvegicus] > | | | | | | | | | |
| 735 | HOEMK92R | ribosomal protein L37a [Homo sapiens] >gi\|36134 | gi\|292439 | 3 | 185 | 96 | 96 | HOEMK92 | Lung, | | |
| | | ribosomal protein L37a [Homo sapiens] >gi\|57123 | | | | | | | Pancreas, | | |
| | | ribosomal protein L37a (AA 1-92) [Rattus rattus] | | | | | | | Breast/ | | |
| | | >gi\|312414 ribosomal protein L37a [Mus musculus] | | | | | | | Ovarian | | |
| | | >pir\|S05014\|R5RT37 ribosomal protein L37a - rat | | | | | | | | | |
| | | >pir\|S42109 | | | | | | | | | |
| 736 | HABAD57R | ribosomal protein LA [Homo sapiens] | gi\|307385 | 210 | 431 | 80 | 90 | HABAD57 | Lung, | | |
| | | >pir\|S39803\|S39803 ribosomal protein L4 - human | | | | | | | Pancreas | | |
| | | Length = 425 | | | | | | | | | |
| 737 | HLXNA52R | ribosomal protein LA [Rattus norvegicus] | gnl\|PID\|e121603 | 3 | 296 | 86 | 86 | HLXNA52 | Lung, | | |
| | | Length = 421 | | | | | | | Pancreas | | |
| 738 | HWAFK82R | ribosomal protein L9 [Homo sapiens] | gi\|710366 | 139 | 354 | 77 | 78 | HWAFK82 | Lung, | | |
| | | >gnl\|PID\|d1003911 ‘human homologue of rat | | | | | | | Colon, | | |
| | | ribosomal protein L9’ [Homo sapiens] Length = 192 | | | | | | | Breast/ | | |
| | | | | | | | | | Ovarian | | |
| 739 | H2CBL68R | ribosomal protein S13 [Homo sapiens] >gi\|488417 | gi\|307391 | 3 | 461 | 100 | 100 | H2CBL68 | Lung, | | |
| | | ribosomal protein S13 [Homo sapiens] | | | | | | | Pancreas | | |
| | | >gnl\|PID\|d1014222 ribosomal protein S13 [Homo | | | | | | | | | |
| | | sapiens] >gi\|57730 ribosomal protein S13 | | | | | | | | | |
| | | [Rattus rattus] >pir\|S34109\|S34109 | | | | | | | | | |
| | | ribosomal protein S13, cytosolic - human >pir\|A3 | | | | | | | | | |
| 740 | HNTNE17R | ribosomal protein S17 [Homo sapiens] >gi\|337503 | gi\|337501 | 1 | 387 | 100 | 100 | HNTNE17 | Lung, | | |
| | | S17 ribosomal protein [Homo sapiens] | | | | | | | Pancreas, | | |
| | | >pir\|JT0405\|R4HU17 ribosomal protein S17, | | | | | | | Breast/ | | |
| | | cytosolic - human Length = 135 | | | | | | | Ovarian | | |
| 741 | HBJLR37R | ribosomal protein S26 [Homo sapiens] | gi\|296452 | 2 | 328 | 98 | 100 | HBJLR37 | Pancreas, | | |
| | | Length = 115 | | | | | | | Colon, | | |
| | | | | | | | | | Breast/ | | |
| | | | | | | | | | Ovarian | | |
| 742 | HOSNG20R | ribosomal protein S4X isoform [Homo sapiens] | gi\|337510 | 1 | 357 | 97 | 98 | HOSNG20 | Lung, | | |
| | | >gi\|2791861 (AF041428) ribosomal protein s4 X | | | | | | | Pancreas, | | |
| | | isoform [Homo sapiens] >gi\|200864 ribosomal | | | | | | | Colon, | | |
| | | protein S4 [Mus musculus] >gi\|57135 ribosomal | | | | | | | Breast/ | | |
| | | protein S4 (AA 1-263) [Rattus rattus] | | | | | | | Ovarian | | |
| | | >gnl\|PID\|d1002335 ribosomal protei | | | | | | | | | |
| 743 | HCLBZ30R | ribosomal protein S5 [Mus musculus] Length = 204 | gi\|1685071 | 2 | 244 | 89 | 89 | HCLBZ30 | Lung, | | |
| | | | | | | | | | Pancreas, | | |
| | | | | | | | | | Colon, | | |
| | | | | | | | | | Breast/ | | |
| | | | | | | | | | Ovarian | | |
| 744 | HBGNY11R | ribosomal protein S8 [Homo sapiens] >gi\|57139 | gi\|36150 | 2 | 334 | 100 | 100 | HBGNY11 | Lung, | | |
| | | ribosomal protein S8 (AA 1-208) [Rattus | | | | | | | Pancreas, | | |
| | | norvegicus] >gi\|313298 ribosomal protein S8 [Mus | | | | | | | Breast/ | | |
| | | musculus] >pir\|S01609\|R3RT8 ribosomal protein | | | | | | | Ovarian | | |
| | | S8 - rat >pir\|S42110\|S42110 ribosomal protein S8 - | | | | | | | | | |
| | | mouse >pir\|S25022\|S2502 | | | | | | | | | |
| 745 | HOEKC80R | S19 ribosomal protein [Homo sapiens] | gi\|337733 | 2 | 376 | 98 | 98 | HOEKC80 | Lung, | | |
| | | >pir\|I52692\|I52692 ribosomal protein S19, | | | | | | | Pancreas, | | |
| | | cytosolic - human Length = 145 | | | | | | | Colon, | | |
| | | | | | | | | | Breast/ | | |
| | | | | | | | | | Ovarian | | |
| 746 | HCHBM70R | secretory protein [Homo sapiens] >gi\|940946 | gi\|402483 | 1 | 114 | 57 | 57 | HCHBM70 | Colon, | | |
| | | intestinal trefoil factor [Homo sapiens] | | | | | | | Breast/ | | |
| | | >pir\|A48284\|A48284 intestinal trefoil factor 3 | | | | | | | Ovarian | | |
| | | precursor - human >sp\|Q07654\|ITF_HUMAN | | | | | | | | | |
| | | INTESTINAL TREFOIL FACTOR PRECURSOR | | | | | | | | | |
| | | (HP1.B). Length = 80 | | | | | | | | | |
| 747 | HFCES53R | semaphorin C [Mus musculus] >pir\|148746\|148746 | gi\|854328 | 1 | 165 | 80 | 86 | HFCES53 | Colon, | | |
| | | semaphorin C - mouse (fragment) | | | | | | | Breast/ | | |
| | | >sp\|Q62179\|Q62179 SEMAPHORIN C (SEM C) | | | | | | | Ovarian | | |
| | | (FRAGMENT). Length = 782 | | | | | | | | | |
| 748 | HCRQC92R | spermidine/spermine N1-acetyltransferase [Homo | gi\|338392 | 3 | 278 | 98 | 98 | HCRQC92 | Lung, | | |
| | | sapiens] >gi\|338336 spermidine/spermine N1- | | | | | | | Colon, | | |
| | | acetyltransferase [Homo sapiens] | | | | | | | Breast/ | | |
| | | >sp\|P21673\|ATDA_HUMAN DIAMINE | | | | | | | Ovarian | | |
| | | ACETYLTRANSFERASE (EC 2.3.1.57) | | | | | | | | | |
| | | (SPERMIDINE/SPERMINE N1- | | | | | | | | | |
| | | ACETYLTRANSFERASE) (SSAT) (PUTRESCINE | | | | | | | | | |
| | | ACETYLT | | | | | | | | | |
| 749 | HAOAG75R | TARBP-b gene product [Homo sapiens] Length = | gi\|347964 | 2 | 418 | 100 | 100 | HAOAG75 | Lung, | | |
| | | 277 | | | | | | | Colon | | |
| 750 | HWAFE36R | TEGT gene product [Homo sapiens] | gi\|458545 | 2 | 127 | 100 | 100 | HWAFE36 | Pancreas, | | |
| | | >pir\|I38334\|I38334 TEGT (testis enhanced gene | | | | | | | Colon | | |
| | | transcript) - human Length = 237 | | | | | | | | | |
| 751 | HBGOU57R | TIMP gene product [Homo sapiens] >gi\|182483 | gi\|490094 | 60 | 314 | 75 | 75 | HBGOU57 | Lung, | | |
| | | prefibroblast collagenase inhibitor [Homo sapiens] | | | | | | | Pancreas, | | |
| | | >gi\|189382 collagenase inhibitor [Homo sapiens] | | | | | | | Breast/ | | |
| | | >gi\|37183 precursor [Homo sapiens] | | | | | | | Ovarian | | |
| | | >pir\|A93372\|ZYHUEP metalloproteinase tissue | | | | | | | | | |
| | | inhibitor 1 precursor - human >gi | | | | | | | | | |
| 752 | HTXPF20R | TIMP gene product [Homo sapiens] >gi\|182483 | gi\|490094 | 1 | 549 | 84 | 84 | HTXPF20 | Lung, | | |
| | | prefibroblast collagenase inhibitor [Homo sapiens] | | | | | | | Pancreas, | | |
| | | >gi\|189382 collagenase inhibitor [Homo sapiens] | | | | | | | Colon, | | |
| | | >gi\|37183 precursor [Homo sapiens] | | | | | | | Breast/ | | |
| | | >pir\|A93372\|ZYHUEP metalloproteinase tissue | | | | | | | Ovarian | | |
| | | inhibitor 1 precursor - human >gi | | | | | | | | | |
| 753 | HCRMD09R | transforming growth factor-beta 1 binding protein | gi\|339548 | 2 | 460 | 86 | 87 | HCRMD09 | Lung, | | |
| | | precursor [Homo sapiens] >pir\|A35626\|A35626 | | | | | | | Pancreas, | | |
| | | transforming growth factor beta-1-binding protein - | | | | | | | Colon | | |
| | | human Length = 1394 | | | | | | | | | |
| 754 | HAJRB47R | triose-phosphate isomerase [Pan troglodytes] | gi\|176960 | 2 | 334 | 100 | 100 | HAJRB47 | Lung, | | |
| | | >gi\|37247 triosephosphate isomerase [Homo | | | | | | | Pancreas, | | |
| | | sapiens] >gi\|1200507 triosephosphate isomerase | | | | | | | Breast/ | | |
| | | [Homo sapiens] >gi\|339841 triosephosphate | | | | | | | Ovarian | | |
| | | isomerase (EC 5.3,1.1) [Homo sapiens] | | | | | | | | | |
| | | >pir\|S29743\|ISHUT triose-phosphate isomer | | | | | | | | | |
| 755 | HABGB36R | | | 6 | 251 | | | HABGB36 | Lung, | | |
| | | | | | | | | | Breast/ | | |
| | | | | | | | | | Ovarian | | |
| 756 | HADBF86R | | | 3 | 158 | | | HADBF86 | Lung, | | |
| | | | | | | | | | Colon | | |
| 757 | HADDP09R | | | 2 | 97 | | | HADDP09 | Lung, | | |
| | | | | | | | | | Pancreas, | | |
| | | | | | | | | | Colon, | | |
| | | | | | | | | | Breast/ | | |
| | | | | | | | | | Ovarian | | |
| 758 | HAGCY06R | | | 2 | 58 | | | HAGCY06 | Pancreas, | | |
| | | | | | | | | | Breast/ | | |
| | | | | | | | | | Ovarian | | |
| 759 | HAGDI75R | | | 1 | 66 | | | HAGDI75 | Colon, | | |
| | | | | | | | | | Breast/ | | |
| | | | | | | | | | Ovarian | | |
| 760 | HAHBD47R | | | 118 | 429 | | | HAHBD47 | Lung, | | |
| | | | | | | | | | Pancreas | | |
| 761 | HAHCR61R | | | 165 | 422 | | | HAHCR61 | Pancreas, | | |
| | | | | | | | | | Colon | | |
| 762 | HAJAU22R | | | 101 | 202 | | | HAJAU22 | Pancreas, | | |
| | | | | | | | | | Colon | | |
| 763 | HAMGB62R | | | 212 | 370 | | | HAMGB62 | Lung, | | |
| | | | | | | | | | Pancreas, | | |
| | | | | | | | | | Colon, | | |
| | | | | | | | | | Breast/ | | |
| | | | | | | | | | Ovarian | | |
| 764 | HANGC52R | | | 3 | 98 | | | HANGC52 | Lung, | | |
| | | | | | | | | | Pancreas, | | |
| | | | | | | | | | Colon | | |
| 765 | HAPCF30R | | | 2 | 94 | | | HAPCF30 | Lung, | | |
| | | | | | | | | | Colon | | |
| 766 | HAPPV45R | | | 216 | 536 | | | HAPPV45 | Lung, | | |
| | | | | | | | | | Pancreas | | |
| 767 | HAPQK19R | | | 200 | 415 | | | HAPQK19 | Lung, | | |
| | | | | | | | | | Pancreas | | |
| 768 | HAPRL82R | | | 3 | 233 | | | HAPRL82 | Lung, | | |
| | | | | | | | | | Pancreas | | |
| 769 | HAQBT45R | | | 40 | 255 | | | HAQBT45 | Lung, | | |
| | | | | | | | | | Colon | | |
| 770 | HAUAL56R | | | 127 | 315 | | | HAUAL56 | Pancreas, | | |
| | | | | | | | | | Breast/ | | |
| | | | | | | | | | Ovarian | | |
| 771 | HAUBR22R | | | 2 | 67 | | | HAUBR22 | Pancreas, | | |
| | | | | | | | | | Colon, | | |
| | | | | | | | | | Breast/ | | |
| | | | | | | | | | Ovarian | | |
| 772 | HBAFN19R | | | 3 | 257 | | | HBAFN19 | Lung, | | |
| | | | | | | | | | Colon, | | |
| | | | | | | | | | Breast/ | | |
| | | | | | | | | | Ovarian | | |
| 773 | HBGOK25R | | | 274 | 528 | | | HBGOK25 | Pancreas, | | |
| | | | | | | | | | Colon | | |
| 774 | HBGRA76R | | | 2 | 88 | | | HBGRA76 | Pancreas, | | |
| | | | | | | | | | Colon | | |
| 775 | HBGRB47R | | | 1 | 111 | | | HBGRB47 | Lung, | | |
| | | | | | | | | | Pancreas, | | |
| | | | | | | | | | Colon, | | |
| | | | | | | | | | Breast/ | | |
| | | | | | | | | | Ovarian | | |
| 776 | HBJAS24R | | | 1 | 66 | | | HBJAS24 | Colon, | | |
| | | | | | | | | | Breast/ | | |
| | | | | | | | | | Ovarian | | |
| 777 | HBJKI05R | | | 207 | 362 | | | HBJKI05 | Pancreas, | | |
| | | | | | | | | | Colon | | |
| 778 | HBKEC86R | | | 254 | 409 | | | HBKEC86 | Pancreas, | | |
| | | | | | | | | | Colon | | |
| 779 | HBLGD42R | | | 3 | 341 | | | HBLGD42 | Lung, | | |
| | | | | | | | | | Pancreas, | | |
| | | | | | | | | | Colon, | | |
| | | | | | | | | | Breast/ | | |
| | | | | | | | | | Ovarian | | |
| 780 | HBPAF10R | | | 3 | 65 | | | HBPAF10 | Lung, | | |
| | | | | | | | | | Pancreas | | |
| 781 | HCDBU02R | | | 65 | 184 | | | HCDBU02 | Pancreas, | | |
| | | | | | | | | | Colon | | |
| 782 | HCDBU04R | | | 64 | 348 | | | HCDBU04 | Lung, | | |
| | | | | | | | | | Pancreas, | | |
| | | | | | | | | | Colon | | |
| 783 | HCDDT61R | | | 2 | 121 | | | HCDDT61 | Pancreas, | | |
| | | | | | | | | | Colon | | |
| 784 | HCEGY65R | | | 2 | 79 | | | HCEGY65 | Pancreas, | | |
| | | | | | | | | | Colon | | |
| 785 | HCHAK80R | | | 1 | 513 | | | HCHAK80 | Colon, | | |
| | | | | | | | | | Breast/ | | |
| | | | | | | | | | Ovarian | | |
| 786 | HCHMW79R | | | 73 | 432 | | | HCHMW79 | Pancreas, | | |
| | | | | | | | | | Breast/ | | |
| | | | | | | | | | Ovarian | | |
| 787 | HCHOB92R | | | 93 | 350 | | | HCHOB92 | Colon, | | |
| | | | | | | | | | Breast/ | | |
| | | | | | | | | | Ovarian | | |
| 788 | HCLBO01R | | | 45 | 149 | | | HCLBO01 | Lung, | | |
| | | | | | | | | | Colon | | |
| 789 | HCQAN60R | | | 3 | 122 | | | HCQAN60 | Pancreas, | | |
| | | | | | | | | | Colon | | |
| 790 | HCRAK70R | | | 3 | 293 | | | HCRAK70 | Colon, | | |
| | | | | | | | | | Breast/ | | |
| | | | | | | | | | Ovarian | | |
| 791 | HCRPC63R | | | 1 | 129 | | | HCRPC63 | Pancreas, | | |
| | | | | | | | | | Colon | | |
| 792 | HCUDC51R | | | 2 | 265 | | | HCUDC51 | Lung, | | |
| | | | | | | | | | Colon | | |
| 793 | HDPFI40R | | | 139 | 453 | | | HDPFI40 | Lung, | | |
| | | | | | | | | | Pancreas, | | |
| | | | | | | | | | Breast/ | | |
| | | | | | | | | | Ovarian | | |
| 794 | HDPLP23R | | | 1 | 141 | | | HDPLP23 | Pancreas, | | |
| | | | | | | | | | Colon, | | |
| | | | | | | | | | Breast/ | | |
| | | | | | | | | | Ovarian | | |
| 795 | HDPRZ54R | | | 1 | 165 | | | HDPRZ54 | Colon, | | |
| | | | | | | | | | Breast/ | | |
| | | | | | | | | | Ovarian | | |
| 796 | HE9DP46R | | | 2 | 166 | | | HE9DP46 | Lung, | | |
| | | | | | | | | | Pancreas, | | |
| | | | | | | | | | Colon | | |
| 797 | HEGAR19R | | | 361 | 534 | | | HEGAR19 | Lung, | | |
| | | | | | | | | | Colon | | |
| 798 | HFAUO64R | | | 27 | 137 | | | HFAUO64 | Colon, | | |
| | | | | | | | | | Breast/ | | |
| | | | | | | | | | Ovarian | | |
| 799 | HFIAL90R | | | 186 | 308 | | | HFIAL90 | Lung, | | |
| | | | | | | | | | Colon | | |
| 800 | HHBEQ12R | | | 218 | 514 | | | HHBEQ12 | Lung, | | |
| | | | | | | | | | Pancreas | | |
| 801 | HHEUL94R | | | 2 | 127 | | | HHEUL94 | Lung, | | |
| | | | | | | | | | Pancreas, | | |
| 802 | HISCF76R | | | 16 | 153 | | | HISCF76 | Pancreas, | | |
| | | | | | | | | | Colon | | |
| 803 | HJMAU64R | | | 1 | 207 | | | HJMAU64 | Lung, | | |
| | | | | | | | | | Colon | | |
| 804 | HJPCI25R | | | 275 | 508 | | | HJPCI25 | Lung, | | |
| | | | | | | | | | Pancreas, | | |
| | | | | | | | | | Colon | | |
| 805 | HKBAC48R | | | 369 | 542 | | | HKBAC48 | Lung, | | |
| | | | | | | | | | Pancreas, | | |
| | | | | | | | | | Colon, | | |
| | | | | | | | | | Breast/ | | |
| | | | | | | | | | Ovarian | | |
| 806 | HKBAD57R | | | 165 | 341 | | | HKBAD57 | Lung, | | |
| | | | | | | | | | Pancreas | | |
| 807 | HKDBA91R | | | 3 | 332 | | | HKDBA91 | Pancreas, | | |
| | | | | | | | | | Colon | | |
| 808 | HKGDB80R | | | 3 | 224 | | | HKGDB80 | Lung, | | |
| | | | | | | | | | Colon | | |
| 809 | HLDNC95R | | | 289 | 537 | | | HLDNC95 | Lung, | | |
| | | | | | | | | | Pancreas, | | |
| | | | | | | | | | Prostate, | | |
| | | | | | | | | | Colon | | |
| 810 | HMSNI52R | | | 2 | 271 | | | HMSNI52 | Lung, | | |
| | | | | | | | | | Pancreas | | |
| 811 | HODAY16R | | | 134 | 298 | | | HODAY16 | Colon, | | |
| | | | | | | | | | Breast/ | | |
| | | | | | | | | | Ovarian | | |
| 812 | HODEA57R | | | 289 | 471 | | | HODEA57 | Lung, | | |
| | | | | | | | | | Pancreas | | |
| 813 | HOEMO27R | | | 1 | 60 | | | HOEMO27 | Colon, | | |
| | | | | | | | | | Breast/ | | |
| | | | | | | | | | Ovarian | | |
| 814 | HOEMO62R | | | 2 | 73 | | | HOEMO62 | Pancreas, | | |
| | | | | | | | | | Breast/ | | |
| | | | | | | | | | Ovarian | | |
| 815 | HOEMS18R | | | 1 | 102 | | | HOEMS18 | Lung, | | |
| | | | | | | | | | Pancreas, | | |
| | | | | | | | | | Colon, | | |
| | | | | | | | | | Breast/ | | |
| | | | | | | | | | Ovarian | | |
| 816 | HOENU53R | | | 115 | 267 | | | HOENU53 | Lung, | | |
| | | | | | | | | | Colon | | |
| 817 | HOGAP33R | | | 1 | 498 | | | HOGAP33 | Pancreas, | | |
| | | | | | | | | | Prostate, | | |
| | | | | | | | | | Breast/ | | |
| | | | | | | | | | Ovarian | | |
| 818 | HOSMV34R | | | 124 | 327 | | | HOSMV34 | Lung, | | |
| | | | | | | | | | Pancreas, | | |
| | | | | | | | | | Breast/ | | |
| | | | | | | | | | Ovarian | | |
| 819 | HOSNF25R | | | 405 | 587 | | | HOSNF25 | Pancreas, | | |
| | | | | | | | | | Colon | | |
| 820 | HOUHO32R | | | 230 | 391 | | | HOUHO32 | Lung, | | |
| | | | | | | | | | Colon | | |
| 821 | HPIAC23R | | | 2 | 286 | | | HPIAC23 | Lung, | | |
| | | | | | | | | | Breast/ | | |
| | | | | | | | | | Ovarian | | |
| 822 | HRAAD31R | | | 115 | 414 | | | HRAAD31 | Lung, | | |
| | | | | | | | | | Colon | | |
| 823 | HRACR12R | | | 2 | 100 | | | HRACR12 | Pancreas, | | |
| | | | | | | | | | Colon | | |
| 824 | HRADJ57R | | | 2 | 142 | | | HRADJ57 | Lung, | | |
| | | | | | | | | | Colon | | |
| 825 | HROAX48R | | | 184 | 285 | | | HROAX48 | Pancreas, | | |
| | | | | | | | | | Colon | | |
| 826 | HTAHR87R | | | 369 | 491 | | | HTAHR87 | Lung, | | |
| | | | | | | | | | Pancreas | | |
| 827 | HTTIO45R | | | 1 | 288 | | | HTTIO45 | Colon, | | |
| | | | | | | | | | Breast/ | | |
| | | | | | | | | | Ovarian | | |
| 828 | HTWDH05R | | | 1 | 420 | | | HTWDH05 | Lung, | | |
| | | | | | | | | | Pancreas, | | |
| | | | | | | | | | Colon, | | |
| | | | | | | | | | Breast/ | | |
| | | | | | | | | | Ovarian | | |
| 829 | HUFDS13R | | | 51 | 152 | | | HUFDS13 | Pancreas, | | |
| | | | | | | | | | Colon | | |
| 830 | HUSZE86R | | | 2 | 340 | | | HUSZE86 | Pancreas, | | |
| | | | | | | | | | Colon | | |
| 831 | HUTHF75R | | | 161 | 418 | | | HUTHF75 | Lung, | | |
| | | | | | | | | | Pancreas, | | |
| | | | | | | | | | Breast/ | | |
| | | | | | | | | | Ovarian | | |
| 832 | HWAFW07R | | | 3 | 170 | | | HWAFWO7 | Lung, | | |
| | | | | | | | | | Pancreas, | | |
| | | | | | | | | | Colon | | |
| 833 | HWLIB82R | | | 209 | 403 | | | HWLIB82 | Pancreas, | | |
| | | | | | | | | | Colon | | |
| 834 | HWLLX91R | | | 147 | 302 | | | HWLLX91 | Lung, | | |
| | | | | | | | | | Colon | | |
| 835 | HWLMZ54R | | | 1 | 120 | | | HWLMZ54 | Pancreas, | | |
| | | | | | | | | | Colon | | |
| 836 | HMIAI78R | | | 173 | 319 | | | HMIAI78 | Pancreas, | | |
| | | | | | | | | | Colon, | | |
| | | | | | | | | | Breast/ | | |
| | | | | | | | | | Ovarian | | |
| 837 | HBGFJ39R | unknown product specific to adipose tissue [Homo | gnl\|PID\|d1008821 | 1 | 153 | 100 | 100 | HBGFJ39 | Pancreas, | | |
| | | sapiens] >sp\|Q15847\|Q15847 HYPOTHETICAL | | | | | | | Colon | | |
| | | 7.9 KD PROTEIN. Length = 76 | | | | | | | | | |
| 838 | HAMHH32R | | | 1 | 123 | | | HAMHH32 | Lung, | | |
| | | | | | | | | | Colon | | |
| 839 | HAQBQ95R | | | 104 | 205 | | | HAQBQ95 | Colon, | | |
| | | | | | | | | | Breast/ | | |
| | | | | | | | | | Ovarian | | |
| 840 | HAGHY58R | URF 1 (NADH dehydrogenase subunit) [Homo | gi\|13004 | 157 | 411 | 95 | 95 | HAGHY58 | Lung, | | |
| | | sapiens] >gi\|337189 protein 1 [Homo sapiens] | | | | | | | Colon | | |
| | | >pir\|A00407\|DNHUN1 NADH dehydrogenase | | | | | | | | | |
| | | (ubiquinone) (EC 1.6.5.3) chain 1 - human | | | | | | | | | |
| | | mitochondrion (SGC1) | | | | | | | | | |
| | | >sp\|P03886\|NU1M_HUMAN NADH- | | | | | | | | | |
| | | UBIQUINONE OXIDOREDUCTASE CHAIN 1 | | | | | | | | | |
| | | (EC 1.6 | | | | | | | | | |
| 841 | HOSNE37R | URF 2 (NADH dehydrogenase subunit) [Homo | gi\|578710 | 73 | 231 | 59 | 62 | HOSNE37 | Lung, | | |
| | | sapiens] >gi\|2052363 protein 2 [Homo sapiens] | | | | | | | Pancreas, | | |
| | | >gi\|2582057 (AF014882) NADH dehydrogenase | | | | | | | Colon | | |
| | | subunit 2 [Homo sapiens] >gi\|2582061 (AF014884) | | | | | | | | | |
| | | NADH dehydrogenase subunit 2 [Homo sapiens] | | | | | | | | | |
| | | >gi\|2582063 (AF014885) NADH dehydr | | | | | | | | | |
| 842 | HWAFE41R | VDUP1 = 1,25-dihydroxyvitamin D-3 up-regulated | bbs\|155932 | 2 | 508 | 84 | 84 | HWAFE41 | Pancreas, | | |
| | | [human, HL-60 promyclocytic leukemia cells, | | | | | | | Colon | | |
| | | Peptide, 391 aa] [Homo sapiens] Length = 391 | | | | | | | | | |

[0040] The first column of Table 1 shows the “SEQ ID NO:” for each of the 842 cancer antigen polynucleotide sequences of the invention.

[0041] The second column in Table 1, provides a unique “Sequence/Contig ID” identification for each cancer associated sequence. The third column in Table 1, “Gene Name,” provides a putative identification of the gene based on the sequence similarity of its translation product to an amino acid sequence found in a publicly accessible gene database, such as GenBank (NCBI). The great majority of the cDNA sequences reported in Table 1 are unrelated to any sequences previously described in the literature. The fourth column, in Table 1, “Overlap,” provides the database accession no. for the database sequence having similarity. The fifth and sixth columns in Table 1 provide the location (nucleotide position nos. within the contig), “Start” and “End”, in the polynucleotide sequence “SEQ ID NO:X” that delineate the preferred ORF shown in the sequence listing as SEQ ID NO:Y. In one embodiment, the invention provides a protein comprising, or alternatively consisting of, a polypeptide encoded by the portion of SEQ ID NO:X delineated by the nucleotide position nos. “Start” and “End”. Also provided are polynucleotides encoding such proteins and the complementary strand thereto. The seventh and eighth columns provide the “% Id” (percent identity) and “% Si” (percent similarity) observed between the aligned sequence segments of the translation product of SEQ ID NO:X and the database sequence.

[0042] The ninth column of Table 1 provides a unique “Clone ID” for a clone related to each contig sequence. This clone ID references the cDNA clone which contains at least the 5′ most sequence of the assembled contig and at least a portion of SEQ ID NO:X was determined by directly sequencing the referenced clone. The reference clone may have more sequence than described in the sequence listing or the clone may have less. In the vast majority of cases, however, the clone is believed to encode a full-length polypeptide. In the case where a clone is not full-length, a full-length cDNA can be obtained by methods described elsewhere herein.

[0043] The tenth column of Table 1, “Tissue,” provides the tissue source where each unique SEQ ID NO:X was found to be predominantly expressed.

[0044] Table 3 indicates public ESTs, of which at least one, two, three, four, five, ten, or more of any one or more of these public ESTs are optionally excluded from the invention.

[0045] SEQ ID NO:X (where X may be any of the polynucleotide sequences disclosed in the sequence listing as SEQ ID NO:1 through SEQ ID NO:842) and the translated SEQ ID NO:Y (where Y may be any of the polypeptide sequences disclosed in the sequence listing as SEQ ID NO:843 through SEQ ID NO:1684) are sufficiently accurate and otherwise suitable for a variety of uses well known in the art and decribed further below. For instance, SEQ ID NO:X has uses including, but not limited to, in designing nucleic acid hybridization probes that will detect nucleic acid sequences contained in SEQ ID NO:X or the related cDNA clone contained in a library deposited with the ATCC. These probes will also hybridize to nucleic acid molecules in biological samples, thereby enabling immediate applications in chromosome mapping, linkage analysis, tissue identification and/or typing, and a variety of forensic and diagnostic methods of the invention. Similarly, polypeptides identified from SEQ ID NO:Y have uses that include, but are not limited to, generating antibodies which bind specifically to the cancer antigen polypeptides, or fragments thereof, and/or to the cancer antigen polypeptides encoded by the cDNA clones identified in Table 1.

[0046] Nevertheless, DNA sequences generated by sequencing reactions can contain sequencing errors. The errors exist as misidentified nucleotides, or as insertions or deletions of nucleotides in the generated DNA sequence. The erroneously inserted or deleted nucleotides cause frame shifts in the reading frames of the predicted amino acid sequence. In these cases, the predicted amino acid sequence diverges from the actual amino acid sequence, even though the generated DNA sequence may be greater than 99.9% identical to the actual DNA sequence (for example, one base insertion or deletion in an open reading frame of over 1000 bases).

[0047] Accordingly, for those applications requiring precision in the nucleotide sequence or the amino acid sequence, the present invention provides not only the generated nucleotide sequence identified as SEQ ID NO:X, the predicted translated amino acid sequence identified as SEQ ID NO:Y, but also a sample of plasmid DNA containing the related cDNA clone (deposited with the ATCC, as set forth in Table 1). The nucleotide sequence of each deposited clone can readily be determined by sequencing the deposited clone in accordance with known methods. Further, techniques known in the art can be used to verify the nucleotide sequences of SEQ ID NO:X.

[0048] The predicted amino acid sequence can then be verified from such deposits. Moreover, the amino acid sequence of the protein encoded by a particular clone can also be directly determined by peptide sequencing or by expressing the protein in a suitable host cell containing the deposited human cDNA, collecting the protein, and determining its sequence.

[0049] The present invention also relates to vectors or plasmids which include such DNA sequences, as well as the use of the DNA sequences. The material deposited with the ATCC on:

TABLE 2

| | Deposit | |
|---|---|---|
| ATCC Deposits | Date | ATCC Designation Number |
| LP01, LP02, | May-20- | 209059, 209060, 209061, 209062, |
| LP03, LP04, LP05, | 97 | 209063 209064, 209065, 209066, |
| LP06, LP07, LP08, | | 209067, 209068, 209069 |
| LP09, LP10, LP11, | | |
| LP12 | Jan-12-98 | 209579 |
| LP13 | Jan-12-98 | 209578 |
| LP14 | Jul-16-98 | 203067 |
| LP15 | Jul-16-98 | 203068 |
| LP16 | Feb-1-99 | 203609 |
| LP17 | Feb-1-99 | 203610 |
| LP20 | Nov-17-98 | 203485 |
| LP21 | Jun-18-99 | PTA-252 |
| LP22 | Jun-18-99 | PTA-253 |
| LP23 | Dec-22-99 | PTA-1081 |

[0050] each is a mixture of cDNA clones derived from a variety of human tissue and cloned in either a plasmid vector or a phage vector, as shown in Table 5. These deposits are referred to as “the deposits” herein. The tissues from which the clones were derived are listed in Table 5, and the vector in which the cDNA is contained is also indicated in Table 5. The deposited material includes the CDNA clones which were partially sequenced and are related to the SEQ ID NO:X described in Table 1 (column 9). Thus, a clone which is isolatable from the ATCC Deposits by use of a sequence listed as SEQ ID NO:X may include the entire coding region of a human gene or in other cases such clone may include a substantial portion of the coding region of a human gene. Although the sequence listing lists only a portion of the DNA sequence in a clone included in the ATCC Deposits, it is well within the ability of one skilled in the art to complete the sequence of the DNA included in a clone isolatable from the ATCC Deposits by use of a sequence (or portion thereof) listed in Table 1 by procedures hereinafter further described, and others apparent to those skilled in the art.

[0051] Also provided in Table 5 is the name of the vector which contains the cDNA clone. Each vector is routinely used in the art. The following additional information is provided for convenience.

[0052] Vectors Lambda Zap (U.S. Pat. Nos. 5,128,256 and 5,286,636), Uni-Zap XR (U.S. Pat. Nos. 5,128, 256 and 5,286,636), Zap Express (U.S. Pat. Nos. 5,128,256 and 5,286,636), pBluescript (pBS) (Short, J. M. et al., Nucleic Acids Res. 16:7583-7600 (1988); Alting-Mees, M. A. and Short, J. M., Nucleic Acids Res. 17:9494 (1989)) and pBK (Alting-Mees, M. A. et al., Strategies 5:58-61 (1992)) are commercially available from Stratagene Cloning Systems, Inc., 11011 N. Torrey Pines Road, La Jolla, Calif., 92037. pBS contains an ampicillin resistance gene and pBK contains a neomycin resistance gene. Phagemid pBS may be excised from the Lambda Zap and Uni-Zap XR vectors, and phagemid pBK may be excised from the Zap Express vector. Both phagemids may be transformed into E. coli strain XL-1 Blue, also available from Stratagene.

[0053] Vectors pSportl, pCMVSport 1.0, pCMVSport 2.0 and pCMVSport 3.0, were obtained from Life Technologies, Inc., P. O. Box 6009, Gaithersburg, Md. 20897. All Sport vectors contain an ampicillin resistance gene and may be transformed into E. coli strain DH10B, also available from Life Technologies. See, for instance, Gruber, C. E., et al., Focus 15:59 (1993). Vector lafmid BA (Bento Soares, Columbia University, New York, N.Y.) contains an ampicillin resistance gene and can be transformed into E. coli strain XL-1 Blue. Vector pCR®2.1, which is available from Invitrogen, 1600 Faraday Avenue, Carlsbad, Calif. 92008, contains an ampicillin resistance gene and may be transformed into E. coli strain DH10B, available from Life Technologies. See, for instance, Clark, J. M., Nuc. Acids Res. 16:9677-9686 (1988) and Mead, D. et al., Bio/Technology 9: (1991).

[0054] The present invention also relates to the genes corresponding to SEQ ID NO:X, SEQ ID NO:Y, and/or the cDNA contained in a deposited cDNA clone. The corresponding gene can be isolated in accordance with known methods using the sequence information disclosed herein. Such methods include, but are not limited to, preparing probes or primers from the disclosed sequence and identifying or amplifying the corresponding gene from appropriate sources of genomic material.

[0055] Also provided in the present invention are allelic variants, orthologs, and/or species homologs. Procedures known in the art can be used to obtain full-length genes, allelic variants, splice variants, full-length coding portions, orthologs, and/or species homologs of genes corresponding to SEQ ID NO:X, SEQ ID NO:Y, and/or the cDNA contained in the related cDNA clone in the deposit, using information from the sequences disclosed herein or the clones deposited with the ATCC. For example, allelic variants and/or species homologs may be isolated and identified by making suitable probes or primers from the sequences provided herein and screening a suitable nucleic acid source for allelic variants and/or the desired homologue.

[0056] The present invention provides a polynucleotide comprising, or alternatively consisting of, the nucleic acid sequence of SEQ ID NO:X, and/or the related cDNA clone (See, e.g., columns 1 and 9 of Table 1). The present invention also provides a polypeptide comprising, or alternatively, consisting of, the polypeptide sequence of SEQ ID NO:Y, a polypeptide encoded by SEQ ID NO:X, and/or a polypeptide encoded by the cDNA in the related cDNA clone contained in a deposited library. Polynucleotides encoding a polypeptide comprising, or alternatively consisting of, the polypeptide sequence of SEQ ID NO:Y, a polypeptide encoded by SEQ ID NO:X, and/or a polypeptide encoded by the the dDNA in the related cDNA clone contained in a deposited library, are also encompassed by the invention. The present invention further encompasses a polynucleotide comprising, or alternatively consisting of, the complement of the nucleic acid sequence of SEQ ID NO:X, and/or the complement of the coding strand of the related cDNA clone contained in a deposited library.

[0057] Many polynucleotide sequences, such as EST sequences, are publicly available and accessible through sequence databases and may have been publicly available prior to conception of the present invention. Preferably, such related polynucleotides are specifically excluded from the scope of the present invention. To list every related sequence would unduly burden the disclosure of this application. Accordingly, for each “Contig Id” listed in the first column of Table 3, preferably excluded are one or more polynucleotides comprising a nucleotide sequence described in the second column of Table 3 by the general formula of a-b, each of which are uniquely defined for the SEQ ID NO:X corresponding to that Contig Id in Table 1. Additionally, specific embodiments are directed to polynucleotide sequences excluding at least one, two, three, four, five, ten, or more of the specific polynucleotide sequences referenced by the Genbank Accession No. for each Contig Id which may be included in column 3 of Table 3. In no way is this listing meant to encompass all of the sequences which may be excluded by the general formula, it is just a representative example.

TABLE 3

| Sequence/ | | | |
|---|---|---|---|
| Contig ID | General formula | Genbank Accession No. | |
| 507291 | Preferably excluded from the present invention are | | |
| | one or more polynucleotides comprising a nucleotide | | |
| | sequence described by the general formula of a − b, | | |
| | where a is any integer between 1 to 542 of SEQ ID | | |
| | NO: 1, b is an integer of 15 to 556, where both a and b | | |
| | correspond to the positions of nucleotide residues | | |
| | shown in SEQ ID NO: 1, and where b is greater than or | | |
| | equal to a + 14. | | |
| 508000 | Preferably excluded from the present invention are | T40333, T41194, T66286, T66339, T73997, T86453, T87207, R17614, R19835, R43336, | |
| | one or more polynucleotides comprising a nucleotide | R45934, R48920, R53521, R43336, R45934, R61813, R75928, R75937, H30115 | |
| | sequence described by the general formula of a − b, | H42959, H39114, H43825, AA028010, AA028107, AA028148, AA031964, AA032046 | |
| | where a is any integer between 1 to 2648 of SEQ ID | AA035668, AA190570, AA233781, AA461489, AA460726, AA460898 | |
| | NO: 2, b is an integer of 15 to 2662, where both a and | | |
| | b correspond to the positions of nucleotide residues | | |
| | shown in SEQ ID NO: 2, and where b is greater than or | | |
| | equal to a + 14. | | |
| 518325 | Preferably excluded from the present invention are | | |
| | one or more polynucleotides comprising a nucleotide | | |
| | sequence described by the general formula of a − b, | | |
| | where a is any integer between 1 to 324 of SEQ ID | | |
| | NO: 3, b is an integer of 15 to 338, where both a and b | | |
| | correspond to the positions of nucleotide residues | | |
| | shown in SEQ ID NO: 3, and where b is greater than or | | |
| | equal to a + 14. | | |
| 523111 | Preferably excluded from the present invention are | | |
| | one or more polynucleotides comprising a nucleotide | | |
| | sequence described by the general formula of a − b, | | |
| | where a is any integer between 1 to 799 of SEQ ID | | |
| | NO: 4, b is an integer of 15 to 813, where both a and b | | |
| | correspond to the positions of nucleotide residues | | |
| | shown in SEQ ID NO: 4, and where b is greater than or | | |
| | equal to a + 14. | | |
| 526869 | Preferably excluded from the present invention are | A459771 | |
| | one or more polynucleotides comprising a nucleotide | | |
| | sequence described by the general formula of a − b, | | |
| | where a is any integer between 1 to 887 of SEQ ID | | |
| | NO: 5, b is an integer of 15 to 901, where both a and b | | |
| | correspond to the positions of nucleotide residues | | |
| | shown in SEQ ID NO: 5, and where b is greater than or | | |
| | equal to a + 14. | | |
| 532211 | Preferably excluded from the present invention are | H30209, H92182, W95693, W95692, AA196967 | |
| | one or more polynucleotides comprising a nucleotide | | |
| | sequence described by the general formula of a − b, | | |
| | where a is any integer between 1 to 717 of SEQ ID | | |
| | NO: 6, b is an integer of 15 to 731, where both a and b | | |
| | correspond to the positions of nucleotide residues | | |
| | shown in SEQ ID NO: 6, and where b is greater than or | | |
| | equal to a + 14. | | |
| 532247 | Preferably excluded from the present invention are | R14583, R93797, H52942, H75493, H78857, W17094, W38705, W81551, W90159, | |
| | one or more polynucleotides comprising a nucleotide | N90874, AA010244, AA029093, AA126501, AA147066 | |
| | sequence described by the general formula of a − b, | | |
| | where a is any integer between 1 to 2760 of SEQ ID | | |
| | NO: 7, b is an integer of 15 to 2774, where both a and | | |
| | b correspond to the positions of nucleotide residues | | |
| | shown in SEQ ID NO: 7, and where b is greater than or | | |
| | equal to a + 14. | | |
| 537932 | Preferably excluded from the present invention are | T91131, T84801, T85952, R59198, R59256, H43456, H59480, H79111, N26560, | |
| | one or more polynucleotides comprising a nucleotide | N35676, N64506, N66078, N76033, N78705, W07594, W70111, W70169, N90844, | |
| | sequence described by the general formula of a − b, | A026910, AA026911, AA057689, AA079631, AA079805, AA131257, AA136081, | |
| | where a is any integer between 1 to 2599 of SEQ ID | AA165115, AA210764, AA211886, AA232838, AA262352 | |
| | NO: 8, b is an integer of 15 to 2613, where both a and | | |
| | b correspond to the positions of nucleotide residues | | |
| | shown in SEQ ID NO: 8, and where b is greater than or | | |
| | equal to a + 14. | | |
| 540117 | Preferably excluded from the present invention are | T49371, T49372, T49850, T61568, T64892, N39534, W57682, AA031859 | |
| | one or more polynucleotides comprising a nucleotide | | |
| | sequence described by the general formula of a − b, | | |
| | where a is any integer between 1 to 1087 of SEQ ID | | |
| | NO: 9, b is an integer of 15 to 1101, where both a and | | |
| | b correspond to the positions of nucleotide residues | | |
| | shown in SEQ ID NO: 9, and where b is greater than or | | |
| | equal to a + 14. | | |
| 547710 | Preferably excludedfrom the present invention are | R11154, R11155, R61204, R61205, R82674, H06105, R88575, R88638, H89977, | |
| | one or more polynucleotides comprising a nucleotide | H97031, N20224, W01143, W39387, W90318, W90788, AA001027, AA045864, | |
| | sequence described by the general formula of a − b, | AA045839, AA070190, AA070357, AA070481, AA074270, AA099007, AA099084, | |
| | where a is any integer between 1 to 1359 of SEQ ID | AA100370, AA112324, AA113319, AA158425, AA161510, AA171909, AA172133, | |
| | NO: 10, b is an integer of 15 to 1373, where both a and | AA173087, AA181768, AA188815, AA188874, AA190370, AA226831, AA252143 | |
| | b correspond to the positions of nucleotide residues | | |
| | shown in SEQ ID NO: 10, and where b is greater than | | |
| | or equal to a + 14. | | |
| 551747 | Preferably excluded from the present invention are | | |
| | one or more polynucleotides comprising a nucleotide | | |
| | sequence described by the general formula of a − b, | | |
| | where a is any integer between 1 to 3790 of SEQ ID | | |
| | NO: 11, b is an integer of 15 to 3804, where both a and | | |
| | b correspond to the positions of nucleotide residues | | |
| | shown in SEQ ID NO: 11, and where b is greater than | | |
| | or equal to a + 14. | | |
| 552799 | Preferably excluded from the present invention are | | |
| | one or more polynucleotides comprising a nucleotide | | |
| | sequence described by the general formula of a − b, | | |
| | where a is any integer between 1 to 2143 of SEQ ID | | |
| | NO: 12, b is an integer of 15 to 2157, where both a and | | |
| | b correspond to the positions of nucleotide residues | | |
| | shown in SEQ ID NO: 12, and where b is greater than | | |
| | or equal to a + 14. | | |
| 553243 | Preferably excluded from the present invention are | H63183, W61352, AA151059 | |
| | one or more polynucleotides comprising a nucleotide | | |
| | sequence described by the general formula of a − b, | | |
| | where a is any integer between 1 to 1103 of SEQ ID | | |
| | NO: 13, b is an integer of 15 to 1117, where both a and | | |
| | b correspond to the positions of nucleotide residues | | |
| | shown in SEQ ID NO: 13, and where b is greater than | | |
| | or equal to a + 14. | | |
| 553368 | Preferably excluded from the present invention are | | |
| | one or more polynucleotides comprising a nucleotide | | |
| | sequence described by the general formula of a − b, | | |
| | where a is any integer between 1 to 871 of SEQ ID | | |
| | NO: 14, b is an integer of 15 to 885, where both a and | | |
| | b correspond to the positions of nucleotide residues | | |
| | shown in SEQ ID NO: 14, and where b is greater than | | |
| | or equal to a + 14. | | |
| 554349 | Preferably excluded from the present invention are | | |
| | one or more polynucleotides comprising a nucleotide | | |
| | sequence described by the general formula of a − b, | | |
| | where a is any integer between 1 to 1010 of SEQ ID | | |
| | NO: 15, b is an integer of 15 to 1024, where both a and | | |
| | b correspond to the positions of nucleotide residues | | |
| | shown in SEQ ID NO: 15, and where b is greater than | | |
| | or equal to a + 14. | | |
| 558491 | Preferably excluded from the present invention are | | |
| | one or more polynucleotides comprising a nucleotide | | |
| | sequence described by the general formula of a − b, | | |
| | where a is any integer between 1 to 531 of SEQ ID | | |
| | NO: 16, b is an integer of 15 to 545, where both a and | | |
| | correspond to the positions of nucleotide residues | | |
| | shown in SEQ ID NO: 16, and where b is greater than | | |
| | or equal to a + 14. | | |
| 558983 | Preferably excluded from the present invention are | | |
| | one or more polynucleotides comprising a nucleotide | | |
| | sequence described by the general formula of a − b, | | |
| | where a is any integer between 1 to 609 of SEQ ID | | |
| | NO: 17, b is an integer of 15 to 623, where both a and | | |
| | b correspond to the positions of nucleotide residues | | |
| | shown in SEQ ID NO: 17, and where b is greater than | | |
| | or equal to a + 14. | | |
| 572943 | Preferably excluded from the present invention are | | |
| | one or more polynucleotides comprising a nucleotide | | |
| | sequence described by the general formula of a − b, | | |
| | where a is any integer between 1 to 545 of SEQ ID | | |
| | NO: 18, b is an integer of 15 to 559, where both a and | | |
| | correspond to the positions of nucleotide residues | | |
| | shown in SEQ ID NO: 18, and where b is greater than | | |
| | or equal to a + 14. | | |
| 585892 | Preferably excluded from the present invention are | | |
| | one or more polynucleotides comprising a nucleotide | | |
| | sequence described by the general formula of a − b, | | |
| | where a is any integer between 1 to 1341 of SEQ ID | | |
| | NO: 19, b is an integer of 15 to 1355, where both a and | | |
| | b correspond to the positions of nucleotide residues | | |
| | shown in SEQ ID NO: 19, and where b is greater than | | |
| | or equal to a + 14. | | |
| 589390 | Preferably excluded from the present invention are | T47628, T49403, T49829, T49830, T50800, T50963, T51976, T55846, T55860, T55896, | |
| | one or more polynucleotides comprising a nucleotide | T55911, T58744, T58811, T58891, T59252, T59279, T59293, T59615, T59690, T59727, | |
| | sequence described by the general formula of a − b, | T59826, T60434, T60514, T60584, T61357, T40352, T62559, T62688, T62839, T63122, | |
| | where a is any integer between 1 to 1266 of SEQ ID | T64603, T64640, T67682, T67756, T68181, T68439, T68506, T68606, T68718, T68783, | |
| | NO: 20, b is an integer of 15 to 1280, where both a and | T68839, T68849, T68976, T69049, T71223, T71347, T71509, T71853, T71858, T71938, | |
| | b correspond to the positions of nucleotide residues | T72197, T72264, T72414, T72471, T72923, T73204, T73259, T73283, T73446, T73607, | |
| | shown in SEQ ID NO: 20, and where b is greater than | T73621, T73645, T73713, T73744, T73772, T73796, T74114, T74545, T74599, T87829, | |
| | or equal to a + 14. | T90307, T90394, T91481, T92437, T92617, T81767, T82080, R27059, R27060, R31693, | |
| | | R31735, R50548, R50646, R64321, R64322, R75660, R75768, R75866, R76038, | |
| | | R79765, R79766, H22209, H24391, H25902, H27236, H28585, H29860, H29954, | |
| | | H41994, H42226, H42298, H43069, H43893, H43934, R83465, R84983, R94905, | |
| | | R94988, R96360, R96403, R97059, R98674, R98900, R99186, R99187, H50701, | |
| | | H50801, H57754, H62182, H63649, H63650, H64755, H64756, H69075, H70056, | |
| | | H70057, H70855, H70856, H71581, H75758, H75893, H80974, H80975, H83141, | |
| | | H83142, H83271, H85046, H84668, H91780, H92207, H92350, H94891, H94943, | |
| | | H94966, H95486, H99418, N52264, N58261, N74184, N77638, N81021, N92261, | |
| | | N99137, W04350, W07850, W16893, W39467, W45038, W47174, W47433, W52853, | |
| | | W63782, W67635, W67759, W67868, W67881, W93706, W94183, W96351, W96352, | |
| | | N89587, AA012898, AA019884, AA020863, AA025865, AA025866, AA056092, | |
| | | AA057434, AA070445, AA192155, AA192879, AA226741, AA227477 | |
| 596882 | Preferably excluded from the present invention are | | |
| | one or more polynucleotides comprising a nucleotide | | |
| | sequence described by the general formula of a − b, | | |
| | where a is any integer between 1 to 1177 of SEQ ID | | |
| | NO: 21, b is an integer of 15 to 1191, where both a and | | |
| | b correspond to the positions of nucleotide residues | | |
| | shown in SEQ ID NO: 21, and where b is greater than | | |
| | or equal to a + 14. | | |
| 616289 | Preferably excluded from the present invention are | | |
| | one or more polynucleotides comprising a nucleotide | | |
| | sequence described by the general formula of a − b, | | |
| | where a is any integer between 1 to 839 of SEQ ID | | |
| | NO: 22, b is an integer of 15 to 853, where both a and | | |
| | b correspond to the positions of nucleotide residues | | |
| | shown in SEQ ID NO: 22, and where b is greater than | | |
| | or equal to a + 14. | | |
| 622140 | Preferably excluded from the present invention are | W39497, W52751, AA099814, AA128882, AA173072, AA226739 | |
| | one or more polynucleotides comprising a nucleotide | | |
| | sequence described by the general formula of a − b, | | |
| | where a is any integer between 1 to 460 of SEQ ID | | |
| | NO: 23, b is an integer of 15 to 474, where both a and | | |
| | b correspond to the positions of nucleotide residues | | |
| | shown in SEQ ID NO: 23, and where b is greater than | | |
| | or equal to a + 14. | | |
| 623566 | Preferably excluded from the present invention are | | |
| | one or more polynucleotides comprising a nucleotide | | |
| | sequence described by the general formula of a − b, | | |
| | where a is any integer between 1 to 2266 of SEQ ID | | |
| | NO: 24, b is an integer of 15 to 2280, where both a and | | |
| | b correspond to the positions of nucleotide residues | | |
| | shown in SEQ ID NO: 24, and where b is greater than | | |
| | or equal to a + 14. | | |
| 647714 | Preferably excluded from the present invention are | | |
| | one or more polynucleotides comprising a nucleotide | | |
| | sequence described by the general formula of a − b, | | |
| | where a is any integer between 1 to 1047 of SEQ ID | | |
| | NO: 25, b is an integer of 15 to 1061, where both a and | | |
| | b correspond to the positions of nucleotide residues | | |
| | shown in SEQ ID NO: 25, and where b is greater than | | |
| | or equal to a + 14. | | |
| 647752 | Preferably excluded from the present invention are | | |
| | one or more polynucleotides comprising a nucleotide | | |
| | sequence described by the general formula of a − b, | | |
| | where a is any integer between 1 to 1558 of SEQ ID | | |
| | NO: 26, b is an integer of 15 to 1572, where both a and | | |
| | b correspond to the positions of nucleotide residues | | |
| | shown in SEQ ID NO: 26, and where b is greater than | | |
| | or equal to a + 14. | | |
| 651774 | Preferably excluded from the present invention are | T69901, T69949, T70775, R20554, R33030, R33917, R48406, H58331, H58720, | |
| | one or more polynucleotides comprising a nucleotide | H67041, H68124, H93586, H94430, H94513, H97468, H99219, N23459, N26334, | |
| | sequence described by the general formula of a − b, | N35428, N49203, N50256, N64246, N93349, W19550, W19996, W25330, W73940, | |
| | where a is any integer between ito 1991 of SEQ ID | W77984, W93791, W94028, N90424, AA025537, AA025680, AA025371, AA026317, | |
| | NO: 27, b is an integer of 15 to 2005, where both a and | AA026318, AA084549, AA086048, AA086130, AA098995, AA099068, AA115309, | |
| | b correspond to the positions of nucleotide residues | AA136486, AA151843, AA149689, AA148825, AA150406, AA150425, AA173377 | |
| | shown in SEQ ID NO: 27, and where b is greater than | | |
| | or equal to a + 14. | | |
| 651995 | Preferably excluded from the present invention are | | |
| | one or more polynucleotides comprising a nucleotide | | |
| | sequence described by the general formula of a − b, | | |
| | where a is any integer between 1 to 1394 of SEQ ID | | |
| | NO: 28, b is an integer of 15 to 1408, where both a and | | |
| | b correspond to the positions of nucleotide residues | | |
| | shown in SEQ ID NO: 28, and where b is greater than | | |
| | or equal to + 14. | | |
| 652156 | Preferably excluded from the present invention are | T40364, R22492, R49907, R49908, R62310, R62311, R65652, R67030, R81699, R81700, | |
| | one or more polynucleotides comprising a nucleotide | H18589, H20024, H20099, H20123, H20797, H22404, H22615, H25816, H27051, | |
| | sequence described by the general formula of a − b, | H42294, H44827, H49661, H51422, H51465, H56482, H56483, H70295, H86037, | |
| | where a is any integer between 1 to 903 of SEQ ID | H93528, H93860, H96113, H96114, N22715, N31188, N33831, N54495, N70601, | |
| | NO: 29, b is an integer of 15 to 917, where both a and | N70623, N76607, N78626, W04920, W05505, W07305, W15350, W39442, W60859, | |
| | b correspond to the positions of nucleotide residues | W60860, W72726, W76452, AA017463, AA024543, AA024544, AA026421, AA026498, | |
| | shown in SEQ ID NO: 29, and where b is greater than | A027270, AA034429, AA046316, AA046142, AA053920, AA056230, AA063244, | |
| | or equal to a + 14. | AA062885, AA085305, AA128171, AA126216, AA149890, AA150552, AA187825, | |
| | | AA188597, AA417004, AA417190 | |
| 653010 | Preferably excluded from the present invention are | | |
| | one or more polynucleotides comprising a nucleotide | | |
| | sequence described by the general formula of a − b, | | |
| | where a is any integer between 1 to 563 of SEQ ID | | |
| | NO: 30, b is an integer of 15 to 577, where both a and | | |
| | b correspond to the positions of nucleotide residues | | |
| | shown in SEQ ID NO: 30, and where b is greater than | | |
| | or equal to a + 14. | | |
| 655904 | Preferably excluded from the present invention are | T61561, T90265, T90707, R09280, R17627, R43348, R54854, R54658, H20872, H27229, | |
| | one or more polynucleotides comprising a nucleotide | H64571, H64673, H64571, N47495, N54722, N75461, W73679, AA010711, AA010712, | |
| | sequence described by the general formula of a − b, | AA082107, AA130516, AA132052, AA132156, AA147852, AA147908, AA148276, | |
| | where a is any integer between 1 to 2045 of SEQ ID | AA148277, AA181933, AA187549, AA187845, AA186675, AA188310, AA193212 | |
| | NO: 31, b is an integer of 15 to 2059, where both a and | | |
| | b correspond to the positions of nucleotide residues | | |
| | shown in SEQ ID NO: 31, and where b is greater than | | |
| | or equal to a + 14. | | |
| 657852 | Preferably excluded from the present invention are | | |
| | one or more polynucleotides comprising a nucleotide | | |
| | sequence described by the general formula of a − b, | | |
| | where a is any integer between 1 to 535 of SEQ ID | | |
| | NO: 32, b is an integer of 15 to 549, where both a and | | |
| | b correspond to the positions of nucleotide residues | | |
| | shown in SEQ ID NO: 32, and where b is greater than | | |
| | or equal to a + 14. | | |
| 666414 | Preferably excluded from the present invention are | | |
| | one or more polynucleotides comprising a nucleotide | | |
| | sequence described by the general formula of a − b, | | |
| | where a is any integer between 1 to 827 of SEQ ID | | |
| | NO: 33, b is an integer of 15 to 841, where both a and | | |
| | b correspond to the positions of nucleotide residues | | |
| | shown in SEQ ID NO: 33, and where b is greater than | | |
| | or equal to a + 14. | | |
| 667847 | Preferably excluded from the present invention are | T47009, T47010, T55133, T55301, T57663, T57702, T59664, T59797, T59800, T49370, | |
| | one or more polynucleotides comprising a nucleotide | T72020, T26631, R22343, R46325, R48879, R50151, R50204, R55208, R71485, R71535, | |
| | sequence described by the general formula of a − b, | R72144, R72362, R72553, R74062, H13587, H16167, H18121, H20172, H20361, | |
| | where a is any integer between 1 to 849 of SEQ ID | H22514, H40774, H40775, H42435, H42865, H43100, H43164, H45140, H45441, | |
| | NO: 34, b is an integer of 15 to 863, where both a and | H46013, H46083, H46159, R97084, R97131, H56498, H60260, H60567, H67238, | |
| | b correspond to the positions of nucleotide residues | H71802, H77325, H77338, H81556, H87775, H87825, H91889, H92057, H93187, | |
| | shown in SEQ ID NO: 34, and where b is greater than | H96056, H96420, H81556, H99575, N21484, N23829, N24221, N26831, N27079, | |
| | or equal to a + 14. | N27278, N27582, N30213, N30255, N31642, N31989, N31996, N32655, N32790, | |
| | | N35515, N38983, N39859, N40012, N40488, N41792, N41978, N54988, N57097, | |
| | | N70071, N77176, N78930, N80037, N80573, N81058, N92768, N93810, W07000, | |
| | | W07659, W07868, W44961, W44962, W58175, W58263, W58182, AA001206, | |
| | | AA017579, AA026640, AA026706, AA057605, AA058758, AA082491, AA084088, | |
| | | AA086460, AA100968, AA112029, AA121337, AA121500, AA130704, AA130790, | |
| | | AA152420, AA156094, AA156123, AA181929, AA182575, AA182617, AA186931, | |
| | | AA195982, AA253952, AA283976, AA426098, AA425122, AA428823, AA429359 | |
| 670188 | Preferably excluded from the present invention are | | |
| | one or more polynucleotides comprising a nucleotide | | |
| | sequence described by the general formula of a − b, | | |
| | where a is any integer between 1 to 1216 of SEQ ID | | |
| | NO: 35, b is an integer of 15 to 1230, where both a and | | |
| | b correspond to the positions of nucleotide residues | | |
| | shown in SEQ ID NO: 35, and where b is greater than | | |
| | or equal to a + 14. | | |
| 670279 | Preferably excluded from the present invention are | T50781, T51265, T55324, T56327 | |
| | one or more polynucleotides comprising a nucleotide | | |
| | sequence described by the general formula of a − b, | | |
| | where a is any integer between 1 to 626 of SEQ ID | | |
| | NO: 36, b is an integer of 15 to 640, where both a and | | |
| | b correspond to the positions of nucleotide residues | | |
| | shown in SEQ ID NO: 36, and where b is greater than | | |
| | or equal to a + 14. | | |
| 670729 | Preferably excluded from the present invention are | | |
| | one or more polynucleotides comprising a nucleotide | | |
| | sequence described by the general formula of a − b, | | |
| | where a is an integer between 1 to 583 of SEQ ID | | |
| | NO: 37, b is an integer of 15 to 597, where both a and | | |
| | b correspond to the positions of nucleotide residues | | |
| | shown in SEQ ID NO: 37, and where b is greater than | | |
| | or equal to a + 14. | | |
| 674123 | Preferably excluded from the present invention are | | |
| | one or more polynucleotides comprising a nucleotide | | |
| | sequence described by the general formula of a − b, | | |
| | where a is any integer between 1 to 610 of SEQ ID | | |
| | NO: 38, b is an integer of 15 to 624, where both a and | | |
| | b correspond to the positions of nucleotide residues | | |
| | shown in SEQ ID NO: 38, and where b is greater than | | |
| | or equal to a + 14. | | |
| 676496 | Preferably excluded from the present invention are | | |
| | one or more polynucleotides comprising a nucleotide | | |
| | sequence described by the general formula of a − b, | | |
| | where a is any integer between 1 to 1015 of SEQ ID | | |
| | NO: 39, b is an integer of 15 to 1029, where both a and | | |
| | b correspond to the positions of nucleotide residues | | |
| | shown in SEQ ID NO: 39, and where b is greater than | | |
| | or equal to a + 14. | | |
| 678162 | Preferably excluded from the present invention are | T40233, T40521, T41098, T47133, T47529, T49156, T49157, T51636, T55352, T55402, | |
| | one or more polynucleotides comprising a nucleotide | T55422, T57649, T59314, T62530, T62806, T62954, T72271, T73592, T89655, T78884, | |
| | sequence described by the general formula of a − b, | R19194, R89249, R93164, H57861, H93645, N22493, N26661, N32984, N63146, | |
| | where a is any integer between 1 to 1093 of SEQ ID | N66448, N67443, N69984, N72141, N77952, N78933, N81091, N95826, W02074, | |
| | NO: 40, b is an integer of 15 to 1107, where both a and | W24850, W24972, W38365, W44897, W57997, W58080, W65414, W65435, W74634, | |
| | b correspond to the positions of nucleotide residues | AA007562, AA009767, AA022918, AA022939, AA025169, AA029717, AA029656, | |
| | shown in SEQ ID NO: 40, and where b is greater than | AA032096, AA040581, AA046091, AA070493, AA070646, AA070707, AA071405, | |
| | or equal to a + 14. | AA071414, AA074752, AA075706, AA075696, AA079282, AA085620, AA100126, | |
| | | AA126795, AA128838, AA136579, AA143069, AA143200, AA146637, AA147370, | |
| | | AA147705, AA156001, AA157342, AA161090, AA164798, AA179749, AA187235, | |
| | | AA188048, AA187029, AA188384, AA192271, AA196973, AA235468, AA243180, | |
| | | AA459416, AA459642 | |
| 678248 | Preferably excluded from the present invention are | | |
| | one or more polynucleotides comprising a nucleotide | | |
| | sequence described by the general formula of a − b, | | |
| | where a is any integer between 1 to 1037 of SEQ ID | | |
| | NO: 41, b is an integer of 15 to 1051, where both a and | | |
| | b correspond to the positions of nucleotide residues | | |
| | shown in SEQ ID NO: 41, and where b is greater than | | |
| | or equal to a + 14. | | |
| 683668 | Preferably excluded from the present invention are | T49549, T49550, T49700, T49912, T49937, T50912, T51558, T53285, T53375, T53376, | |
| | one or more polynucleotides comprising a nucleotide | T53721, T54314, T54840, T55217, T56413, T99069, T99669, R01522, R31653, R32820, | |
| | sequence described by the general formula of a − b, | R32921, R35743, R50997, R64077, R65723, R69349, R71009, R72798, R72824, | |
| | where a is any integer between ito 2178 of SEQ ID | R76854, R77142, R79240, R79511, R80194, R80295, R81155, H39823, H39824, | |
| | NO: 42, b is an integer of 15 to 2192, where both a and | R84909, R85592, R91193, H50793, H52341, H53594, H53916, H92997, N26572, | |
| | b correspond to the positions of nucleotide residues | N32090, N32406, N34179, N36271, N45401, N49216, N50267, N67233, N67568, | |
| | shown in SEQ ID NO: 42, and where b is greater than | N72254, N75478, N93355, N94504, W00543, W05288, W05816, W23954, W24625, | |
| | or equal to a + 14. | W24650, W25354, W49666, W52302, AA121852, AA121851, AA128593, AA128712, | |
| | | AA136731, AA136688, AA167235, AA167584, AA173693, AA176648, AA176804, | |
| | | AA179999, AA181456, AA181457, AA256158, AA256215, AA256247, AA458729, | |
| | | AA458778, AA464936, AA464937 | |
| 693172 | Preferably excluded from the present invention are | T49005, T50129, T54766, T59468, T71241, T89633, R66699, R67578, H25853, H26090, | |
| | one or more polynucleotides comprising a nucleotide | H41256, H43182, H45273, N58288, N95319, AA054338, AA057604, AA084261 | |
| | sequence described by the general formula of a − b, | | |
| | where a is any integer between 1 to 339 of SEQ ID | | |
| | NO: 43, b is an integer of 15 to 353, where both a and | | |
| | b correspond to the positions of nucleotide residues | | |
| | shown in SEQ ID NO: 43, and where b is greater than | | |
| | or equal to a + 14. | | |
| 694303 | Preferably excluded from the present invention are | | |
| | one or more polynucleotides comprising a nucleotide | | |
| | sequence described by the general formula of a − b, | | |
| | where a is any integer between 1 to 3476 of SEQ ID | | |
| | NO: 44, b is an integer of 15 to 3490, where both a and | | |
| | b correspond to the positions of nucleotide residues | | |
| | shown in SEQ ID NO: 44, and where b is greater than | | |
| | or equal to a + 14. | | |
| 695042 | Preferably excluded from the present invention are | | |
| | one or more polynucleotides comprising a nucleotide | | |
| | sequence described by the general formula of a − b, | | |
| | where a is any integer between 1 to 767 of SEQ ID | | |
| | NO: 45, b is an integer of 15 to 781, where both a and | | |
| | b correspond to the positions of nucleotide residues | | |
| | shown in SEQ ID NO: 45, and where b is greater than | | |
| | or equal to a + 14. | | |
| 699799 | Preferably excluded from the present invention are | T50599, R25615, R31078, R68513, R70896, R75848, R76864, R76865, H01087, | |
| | one or more polynucleotides comprising a nucleotide | H26949, H63077, H75713, H75642, H95014, H98885, N24938, N33815, N47174, | |
| | sequence described by the general formula of a − b, | N47897, N51152, N53997, N59590, N62387, N63017, N67836, N69948, N78655, | |
| | where a is any integer between ito 1417 of SEQ ID | N79355, N94343, N98329, W01767, W03440, W15144, W19292, W25534, W37911, | |
| | NO: 46, b is an integer of 15 to 1431, where both a and | W42857, W42912, W48630, W72791, W76438, W81113, W80546, W80525, W80526, | |
| | b correspond to the positions of nucleotide residues | W84575, W84645, AA010674, AA011261, AA026981, AA031662, AA039737, | |
| | shown in SEQ ID NO: 46, and where b is greater than | A039810, AA040524, AA040523, AA046308, AA046396, AA099365, AA101915, | |
| | or equal to a + 14. | AA129310, AA129354, AA131951, AA186409 | |
| 702216 | Preferably excluded from the present invention are | T64167, T64355, T68409, T68475, T73691, T73717, T97735, T97840, T98899, T99491, | |
| | one or more polynucleotides comprising a nucleotide | R00460, R01214, R01326, H45786, R93124, R96609, H61118, H61119, H61454, | |
| | sequence described by the general formula of a − b, | H62460, H64003, H64052, H91078, H91378, N58480, N64695, N65991, N74260, | |
| | where a is any integer between 1 to 1899 of SEQ ID | N78070, N79244, N91708, N95101, W03761, W04301, N90479, AA130077, AA130076, | |
| | NO: 47, b is an integer of 15 to 1913, where both a and | AA152275, AA150441 | |
| | b correspond to the positions of nucleotide residues | | |
| | shown in SEQ ID NO: 47, and where b is greater than | | |
| | or equal to a + 14. | | |
| 703015 | Preferably excluded from the present invention are | R72819, R73270, H43839, W47195, W52204, AA242894, AA424584, AA424629 | |
| | one or more polynucleotides comprising a nucleotide | | |
| | sequence described by the general formula of a − b, | | |
| | where a is any integer between 1 to 1747 of SEQ ID | | |
| | NO: 48, b is an integer of 15 to 1761, where both a and | | |
| | b correspond to the positions of nucleotide residues | | |
| | shown in SEQ ID NO: 48, and where b is greater than | | |
| | or equal to a + 14. | | |
| 706391 | Preferably excluded from the present invention are | T48974, H26922, H30342, H44743, H45233, R88178, H81778, H92363, N29006, | |
| | one or more polynucleotides comprising a nucleotide | N44860, N46515, AA079547, AA158434, AA160590, AA428285 | |
| | sequence described by the general formula of a − b, | | |
| | where a is any integer between 1 to 942 of SEQ ID | | |
| | NO: 49, b is an integer of 15 to 956, where both a and | | |
| | b correspond to the positions of nucleotide residues | | |
| | shown in SEQ ID NO: 49, and where b is greater than | | |
| | or equal to a + 14. | | |
| 706892 | Preferably excluded from the present invention are | | |
| | one or more polynucleotides comprising a nucleotide | | |
| | sequence described by the general formula of a − b, | | |
| | where a is any integer between 1 to 549 of SEQ ID | | |
| | NO: 50, b is an integer of 15 to 563, where both a and | | |
| | b correspond to the positions of nucleotide residues | | |
| | shown in SEQ ID NO: 50, and where b is greater than | | |
| | or equal to a + 14. | | |
| 706924 | Preferably excluded from the present invention are | T68892, T68966, T75421, R15205, R16398, R41650, R42339, R52995, R52996, R41650, | |
| | one or more polynucleotides comprising a nucleotide | H12000, H16753, H16861, H27652, H27653, H27982, H28497, H29323, H29416, | |
| | sequence described by the general formula of a − b, | H85752, H98511, N22580, N24339, N28586, N42727, N50084, N75803, N78815, | |
| | where a is any integer between 1 to 3201 of SEQ ID | W07245, W21306, W23840, W57924, W58128, W72277, W76304, W86460, AA002243, | |
| | NO: 51, b is an integer of 15 to 3215, where both a and | A002080, AA025565, AA025683, AA026606, AA026718, AA150696, AA150801 | |
| | b correspond to the positions of nucleotide residues | | |
| | shown in SEQ ID NO: 51, and where b is greater than | | |
| | or equal to a + 14. | | |
| 707642 | Preferably excluded from the present invention are | | |
| | one or more polynucleotides comprising a nucleotide | | |
| | sequence described by the general formula of a − b, | | |
| | where a is any integer between 1 to 612 of SEQ ID | | |
| | NO: 52, b is an integer of 15 to 626, where both a and | | |
| | b correspond to the positions of nucleotide residues | | |
| | shown in SEQ ID NO: 52, and where b is greater than | | |
| | or equal to a + 14. | | |
| 710369 | Preferably excluded from the present invention are | T48815, T60685, T91108, T99835, AA150217, AA157340, AA157240, AA171947 | |
| | one or more polynucleotides comprising a nucleotide | | |
| | sequence described by the general formula of a − b, | | |
| | where a is any integer between 1 to 906 of SEQ ID | | |
| | NO: 53, b is an integer of 15 to 920, where both a and | | |
| | b correspond to the positions of nucleotide residues | | |
| | shown in SEQ ID NO: 53, and where b is greater than | | |
| | or equal to a + 14. | | |
| 718826 | Preferably excluded from the present invention are | | |
| | one or more polynucleotides comprising a nucleotide | | |
| | sequence described by the general formula of a − b, | | |
| | where a is any integer between 1 to 1076 of SEQ ID | | |
| | NO: 54, b is an integer of 15 to 1090, where both a and | | |
| | b correspond to the positions of nucleotide residues | | |
| | shown in SEQ ID NO: 54, and where b is greater than | | |
| | or equal to a + 14. | | |
| 719790 | Preferably excluded from the present invention are | T47380, T47538, T47539, T53445, T53446, T54910, T55077, T59959, T60032, T62504, | |
| | one or more polynucleotides comprising a nucleotide | T62649, T63049, T63297, T63382, T65688, T71591, T71742, T93094, T93187, T94131, | |
| | sequence described by the general formula of a − b, | T94222, T91210, T84959, T99044, T99045, R26119, R26148, R33224, R35866, R35626, | |
| | where a is any integer between 1 to 1450 of SEQ ID | R53923, R53924, R69596, R69684, R76209, R76210, R79249, R79521, H03427, | |
| | NO: 55, b is an integer of 15 to 1464, where both a and | H03507, H12529, H13501, H19016, H19310, H21587, H21652, H21653, H30119, | |
| | b correspond to the positions of nucleotide residues | H39693, H42698, H46635, R93371, R98210, R99855, H54120, H54786, H54837, | |
| | shown in SEQ ID NO: 55, and where b is greater than | H58991, H65355, H65566, H67613, H72632, H74102, H95312, N48235, N58029, | |
| | or equal to a + 14. | N64226, N66907, N70763, N78303, N93848, N94316, N95432, N98433, W01816, | |
| | | W02218, W05772, W21419, W24044, W24297, W30823, W32382, W37228, W37317, | |
| | | W40321, W42528, W46445, W49731, W51944, W53011, W53012, W60051, W60129, | |
| | | W60154, W68332, W68216, W72730, W74593, W92813, W93310, AA010985, | |
| | | AA011307, AAO31435, AA035708, AA037040, AA053073, AA053374, AA055567, | |
| | | AA069724, AA069690, AA069682, AA069900, AA069951, AA070693, AA071421, | |
| | | AA074606, AA075555, AA075673, AA075544, AA081017, AA081251, AA081428, | |
| | | AA082119, AA082022, AA082213, AA082241, AA082247, AA082400, AA082365, | |
| | | AA082438, AA082679, AA083225, AA083266, AA083508, AA083411, AA083637, | |
| | | AA084202, AA099623, AA102015, AA099659, AA1001O2, AA100163, AA100429, | |
| | | AA100430, AA100455, AA100456, AA100711, AA100764, AA100906, AA100919, | |
| | | AA100963, AA1O1118, AA102494, AA101184, AA112123, AA122359, AA122360, | |
| | | AA126882, AA127103, AA128195, AA128674, AA128686, AA128741, AA128747, | |
| | | AA128785, AA133488, AA133489, AA130006, AA130007, AA134211, AA130492, | |
| | | AA130507, AA134345, AA134346, AA134457, AA134458, AA134461, AA134462, | |
| | | AA130907, AA131020, AA131973, AA132141, AA132493, AA132601, AA134904, | |
| | | AA135121, AA135182, AA135348, AA136318, AA143066, AA143256, AA143278, | |
| | | AA143386, AA146650, AA146835, AA146836, AA146860, AA146861, AA146870, | |
| | | AA146871, AA146918, AA147716, AA147707, AA147868, AA148130, AA148090, | |
| | | AA148091, AA152422, AA148435, AA148867, AA148492, AA148702, AA151453, | |
| | | AA151452, AA151828, AA155801, AA155886, AA156025, AA156044, AA156053, | |
| | | AA156155, AA156222, AA157080, AA157168, AA157325, AA157423, AA157434, | |
| | | AA157471, AA157605, AA157631, AA157546, AA157775, AA157826, AA158157, | |
| | | AA158273, AA158888, AA158887, AA159153, AA159250, AA160104, AA159856, | |
| | | AA161278, AA161301, AA160817, AA164741, AA165616, AA165606, AA173037, | |
| | | AA173038, AA176229, AA176317, AA179185, AA179190, AA179200, AA181043, | |
| | | AA181262, AA181342, AA181834, AA181989, AA182794, AA187247, AA187342, | |
| | | AA187379, AA187470, AA187528, AA187740, AA187911, AA188028, AA186378, | |
| | | AA186424, AA186441, AA186442, AA186568, AA186653, AA186661, AA186703, | |
| | | AA186910, AA187081, AA187087, AA187078, AA187135, AA188313, AA188330, | |
| | | A188342, AA190473, AA193219 | |
| 720222 | Preferably excluded from the present invention are | A056718, AA428747 | |
| | one or more polynucleotides comprising a nucleotide | | |
| | sequence described by the general formula of a − b, | | |
| | where a is any integer between 1 to 971 of SEQ ID | | |
| | NO: 56, b is an integer of 15 to 985, where both a and | | |
| | b correspond to the positions of nucleotide residues | | |
| | shown in SEQ ID NO: 56, and where b is greater than | | |
| | or equal to a + 14. | | |
| 724033 | Preferably excluded from the present invention are | N50855, AA076233, AA076232 | |
| | one or more polynucleotides comprising a nucleotide | | |
| | sequence described by the general formula of a − b, | | |
| | where a is any integer between 1 to 1232 of SEQ ID | | |
| | NO: 57, b is an integer of 15 to 1246, where both a and | | |
| | b correspond to the positions of nucleotide residues | | |
| | shown in SEQ ID NO: 57, and where b is greater than | | |
| | or equal to a + 14. | | |
| 724767 | Preferably excluded from the present invention are | | |
| | one or more polynucleotides comprising a nucleotide | | |
| | sequence described by the general formula of a − b, | | |
| | where a is any integer between 1 to 1952 of SEQ ID | | |
| | NO: 58, b is an integer of 15 to 1966, where both a and | | |
| | b correspond to the positions of nucleotide residues | | |
| | shown in SEQ ID NO: 58, and where b is greater than | | |
| | or equal to a + 14. | | |
| 727065 | Preferably excluded from the present invention are | T26554, R31862, R31869, R67140, R70861, H00137, H23051, H23350, H60670, | |
| | one or more polynucleotides comprising a nucleotide | N28391, N28646, AAO81571 | |
| | sequence described by the general formula of a − b, | | |
| | where a is any integer between 1 to 1597 of SEQ ID | | |
| | NO: 59, b is an integer of 15 to 1611, where both a and | | |
| | b correspond to the positions of nucleotide residues | | |
| | shown in SEQ ID NO: 59, and where b is greater than | | |
| | or equal to a + 14. | | |
| 727246 | Preferably excluded from the present invention are | | |
| | one or more polynucleotides comprising a nucleotide | | |
| | sequence described by the general formula of a − b, | | |
| | where a is any integer between 1 to 1835 of SEQ ID | | |
| | NO: 60, b is an integer of 15 to 1849, where both a and | | |
| | b correspond to the positions of nucleotide residues | | |
| | shown in SEQ ID NO: 60, and where b is greater than | | |
| | or equal to a + 14. | | |
| 727932 | Preferably excluded from the present invention are | | |
| | one or more polynucleotides comprising a nucleotide | | |
| | sequence described by the general formula of a − b, | | |
| | where a is any integer between 1 to 219 of SEQ ID | | |
| | NO: 61, b is an integer of 15 to 233, where both a and | | |
| | b correspond to the positions of nucleotide residues | | |
| | shown in SEQ ID NO: 61, and where b is greater than | | |
| | or equal to a + 14. | | |
| 731167 | Preferably excluded from the present invention are | | |
| | one or more polynucleotides comprising a nucleotide | | |
| | sequence described by the general formula of a − b, | | |
| | where a is any integer between 1 to 2319 of SEQ ID | | |
| | NO: 62, b is an integer of 15 to 2333, where both a and | | |
| | b correspond to the positions of nucleotide residues | | |
| | shown in SEQ ID NO: 62, and where b is greater than | | |
| | or equal to a + 14. | | |
| 732514 | Preferably excluded from the present invention are | | |
| | one or more polynucleotides comprising a nucleotide | | |
| | sequence described by the general formula of a − b, | | |
| | where a is any integer between 1 to 1456 of SEQ ID | | |
| | NO: 63, b is an integer of 15 to 1470, where both a and | | |
| | b correspond to the positions of nucleotide residues | | |
| | shown in SEQ ID NO: 63, and where b is greater than | | |
| | or equal to a + 14. | | |
| 734080 | Preferably excluded from the present invention are | | |
| | one or more polynucleotides comprising a nucleotide | | |
| | sequence described by the general formula of a − b, | | |
| | where a is any integer between 1 to 925 of SEQ ID | | |
| | NO: 64, b is an integer of 15 to 939, where both a and | | |
| | b correspond to the positions of nucleotide residues | | |
| | shown in SEQ ID NO: 64, and where b is greater than | | |
| | or equal to a + 14. | | |
| 734288 | Preferably excluded from the present invention are | | |
| | one or more polynucleotides comprising a nucleotide | | |
| | sequence described by the general formula of a − b, | | |
| | where a is any integer between 1 to 2054 of SEQ ID | | |
| | NO: 65, b is an integer of 15 to 2068, where both a and | | |
| | b correspond to the positions of nucleotide residues | | |
| | shown in SEQ ID NO: 65, and where b is greater than | | |
| | or equal to a + 14. | | |
| 739448 | Preferably excluded from the present invention are | T53676, T53677, T54741, T55855, T55906, T56935, T57622, T58975, T58979, T61059, | |
| | one or more polynucleotides comprising a nucleotide | T61143, T90498, T90594, T93775, R07734, R07735, R40067, R75954, R75978, T76790, | |
| | sequence described by the general formula of a − b, | R76809, R77290, R77315, R77348, R79433, R79434, R97814, H50168, H70091, | |
| | where a is any integer between 1 to 1377 of SEQ ID | H77406, H80889, H82088, H82195, N33576, N39028, N48219, N49421, N52598, | |
| | NO: 66, b is an integer of 15 to 1391, where both a and | N66328, N67208, N73788, N78932, N92856, N99411, W07071, W17213, W24422, | |
| | b correspond to the positions of nucleotide residues | W25582, W47407, W47574, W49651, W49725, W68140, W68467, AA025829, | |
| | shown in SEQ ID NO: 66, and where b is greater than | AA025972, AA074731, AA074835, AA075316, AA081368, AA081369, AA082652, | |
| | or equal to a + 14. | AA082810, AA101054, AA102495, AA115718, AA115719, AA127079, AA127080, | |
| | | AA127200, AA127199, AA128645, AA128813, AA133732, AA130465, AA130466, | |
| | | AA132111, AA143233, AA143289, AA146780, AA147706, AA148134, AA151491, | |
| | | AA157062, AA157046, AA157630, AA165124, AAL65123, AA164625, AA165420, | |
| | | AA165583, AA173407, AA173462, AA179910, AA179911, AA180198, AA181087, | |
| | | AA181556, AA182450, AA182951, AA186670, AA188289, AA192925, AA193075, | |
| | | AA464823 | |
| 739668 | Preferably excluded from the present invention are | | |
| | one or more polynucleotides comprising a nucleotide | | |
| | sequence described by the general formula of a − b, | | |
| | where a is any integer between 1 to 645 of SEQ ID | | |
| | NO: 67, b is an integer of 15 to 659, where both a and | | |
| | b correspond to the positions of nucleotide residues | | |
| | shown in SEQ ID NO: 67, and where b is greater than | | |
| | or equal to a + 14. | | |
| 740060 | Preferably excluded from the present invention are | | |
| | one or more polynucleotides comprising a nucleotide | | |
| | sequence described by the general formula of a − b, | | |
| | where a is any integer between 1 to 2967 of SEQ ID | | |
| | NO: 68, b is an integer of 15 to 2981, where both a and | | |
| | b correspond to the positions of nucleotide residues | | |
| | shown in SEQ ID NO: 68, and where b is greater than | | |
| | or equal to a + 14. | | |
| 741560 | Preferably excluded from the present invention are | | |
| | one or more polynucleotides comprising a nucleotide | | |
| | sequence described by the general formula of a − b, | | |
| | where a is any integer between 1 to 589 of SEQ ID | | |
| | NO: 69, b is an integer of 15 to 603, where both a and | | |
| | b correspond to the positions of nucleotide residues | | |
| | shown in SEQ ID NO: 69, and where b is greater than | | |
| | or equal to a + 14. | | |
| 742543 | Preferably excluded from the present invention are | | |
| | one or more polynucleotides comprising a nucleotide | | |
| | sequence described by the general formula of a − b, | | |
| | where a is any integer between 1 to 1087 of SEQ ID | | |
| | NO: 70, b is an integer of 15 to 1101, where both a and | | |
| | b correspond to the positions of nucleotide residues | | |
| | shown in SEQ ID NO: 70, and where b is greater than | | |
| | or equal to a + 14. | | |
| 742831 | Preferably excluded from the present invention are | | |
| | one or more polynucleotides comprising a nucleotide | | |
| | sequence described by the general formula of a − b, | | |
| | where a is any integer between 1 to 700 of SEQ ID | | |
| | NO: 71, b is an integer of 15 to 714, where both a and | | |
| | b correspond to the positions of nucleotide residues | | |
| | shown in SEQ ID NO: 71, and where b is greater than | | |
| | or equal to a + 14. | | |
| 745327 | Preferably excluded from the present invention are | | |
| | one or more polynucleotides comprising a nucleotide | | |
| | sequence described by the general formula of a − b, | | |
| | where a is any integer between 1 to 2876 of SEQ ID | | |
| | NO: 72, b is an integer of 15 to 2890, where both a and | | |
| | b correspond to the positions of nucleotide residues | | |
| | shown in SEQ ID NO: 72, and where b is greater than | | |
| | or equal to a + 14. | | |
| 745695 | Preferably excluded from the present invention are | T56303, T58644, T58694, R48815, R48816, R68140, R74376, R78015, R81014, H00852, | |
| | one or more polynucleotides comprising a nucleotide | H01233, H17193, H17969, H25101, H27005, H30607, H41236, H42218, H42290, | |
| | sequence described by the general formula of a − b, | H42904, H42977, H45271, H45342, R83816, R98855, R98939, H53696, H62059, | |
| | where a is any integer between 1 to 2474 of SEQ ID | H82544, H83097, N40713, N92791, W19377, AA025571, AA053695, AA053675, | |
| | NO: 73, b is an integer of 15 to 2488, where both a and | AA069167, AA069166, AA076604, AA076603, AA079426, AA100088, AA099771, | |
| | b correspond to the positions of nucleotide residues | AA130265, AA158402, AA179641, AA235643, AA253454, AA250758, AA458951, | |
| | shown in SEQ ID NO: 73, and where b is greater than | AA458978, AA459194, AA419280, AA419329, AA425117, AA430664 | |
| | or equal to a + 14. | | |
| 750316 | Preferably excluded from the present invention are | | |
| | one or more polynucleotides comprising a nucleotide | | |
| | sequence described by the general formula of a − b, | | |
| | where a is any integer between 1 to 697 of SEQ ID | | |
| | NO: 74, b is an integer of 15 to 711, where both a and | | |
| | b correspond to the positions of nucleotide residues | | |
| | shown in SEQ ID NO: 74, and where b is greater than | | |
| | or equal to a + 14. | | |
| 750522 | Preferably excluded from the present invention are | | |
| | one or more polynucleotides comprising a nucleotide | | |
| | sequence described by the general formula of a − b, | | |
| | where a is any integer between 1 to 892 of SEQ ID | | |
| | NO: 75, b is an integer of 15 to 906, where both a and | | |
| | b correspond to the positions of nucleotide residues | | |
| | shown in SEQ ID NO: 75, and where b is greater than | | |
| | or equal to a + 14. | | |
| 750583 | Preferably excluded from the present invention are | | |
| | one or more polynucleotides comprising a nucleotide | | |
| | sequence described by the general formula of a − b, | | |
| | where a is any integer between 1 to 257 of SEQ ID | | |
| | NO: 76, b is an integer of 15 to 271, where both a and | | |
| | b correspond to the positions of nucleotide residues | | |
| | shown in SEQ ID NO: 76, and where b is greater than | | |
| | or equal to a + 14. | | |
| 751020 | Preferably excluded from the present invention are | N80268, N95387, W57806, W63590, AA182782, AA187759, AA199806, AA262640, | |
| | one or more polynucleotides comprising a nucleotide | AA262111, AA262106, AA460214 | |
| | sequence described by the general formula of a − b, | | |
| | where a is any integer between 1 to 659 of SEQ ID | | |
| | NO: 77, b is an integer of 15 to 673, where both a and | | |
| | b correspond to the positions of nucleotide residues | | |
| | shown in SEQ ID NO: 77, and where b is greater than | | |
| | or equal to a + 14. | | |
| 752196 | Preferably excluded from the present invention are | R67541 | |
| | one or more polynucleotides comprising a nucleotide | | |
| | sequence described by the general formula of a − b, | | |
| | where a is any integer between 1 to 353 of SEQ ID | | |
| | NO: 78, b is an integer of 15 to 367, where both a and | | |
| | b correspond to the positions of nucleotide residues | | |
| | shown in SEQ ID NO: 78, and where b is greater than | | |
| | or equal to a + 14. | | |
| 753084 | Preferably excluded from the present invention are | T93791, T93840, R77826, R78199, R99272, H54274, H65600, H67128, H75533, | |
| | one or more polynucleotides comprising a nucleotide | H75532, H81433, N57836, N58786, N72699, N77475, W02480, W78743, W80625, | |
| | sequence described by the general formula of a − b, | W90276, AA007397, AA127528, AA127529, AA130419, AA147733, AA150095, | |
| | where a is any integer between 1 to 1330 of SEQ ID | AA195008, AA195060 | |
| | NO: 79, b is an integer of 15 to 1344, where both a and | | |
| | b correspond to the positions of nucleotide residues | | |
| | shown in SEQ ID NO: 79, and where b is greater than | | |
| | or equal to a + 14. | | |
| 754957 | Preferably excluded from the present invention are | | |
| | one or more polynucleotides comprising a nucleotide | | |
| | sequence described by the general formula of a − b, | | |
| | where a is any integer between 1 to 3734 of SEQ ID | | |
| | NO: 80, b is an integer of 15 to 3748, where both a and | | |
| | b correspond to the positions of nucleotide residues | | |
| | shown in SEQ ID NO: 80, and where b is greater than | | |
| | or equal to a + 14. | | |
| 756557 | Preferably excluded from the present invention are | | |
| | one or more polynucleotides comprising a nucleotide | | |
| | sequence described by the general formula of a − b, | | |
| | where a is any integer between 1 to 1877 of SEQ ID | | |
| | NO: 81, b is an integer of 15 to 1891, where both a and | | |
| | b correspond to the positions of nucleotide residues | | |
| | shown in SEQ ID NO: 81, and where b is greater than | | |
| | or equal to a + 14. | | |
| 756712 | Preferably excluded from the present invention are | | |
| | one or more polynucleotides comprising a nucleotide | | |
| | sequence described by the general formula of a − b, | | |
| | where a is any integer between 1 to 1940 of SEQ ID | | |
| | NO: 82, b is an integer of 15 to 1954, where both a and | | |
| | b correspond to the positions of nucleotide residues | | |
| | shown in SEQ ID NO: 82, and where b is greater than | | |
| | or equal to a + 14. | | |
| 757414 | Preferably excluded from the present invention are | T49651, T49652, T92946, T93013, H02307, H02419, N42072, AA169576 | |
| | one or more polynucleotides comprising a nucleotide | | |
| | sequence described by the general formula of a − b, | | |
| | where a is any integer between 1 to 922 of SEQ ID | | |
| | NO: 83, b is an integer of 15 to 936, where both a and | | |
| | b correspond to the positions of nucleotide residues | | |
| | shown in SEQ ID NO: 83, and where b is greater than | | |
| | or equal to a + 14. | | |
| 757614 | Preferably excluded from the present invention are | T93709, T96172, H00439, H00480, R85176, H51264, H51834, H53645, H57470, | |
| | one or more polynucleotides comprising a nucleotide | H57991, H73334, N33138, N42318, N94987, AA028955, AA081550, AA082013, | |
| | sequence described by the general formula of a − b, | AA113225, AA113810, AA133619, AA133522, AA132699, AA132810, AA151877, | |
| | where a is any integer between 1 to 1499 of SEQ ID | AA149662, AA157324, AA157422, AA159905, AA165014, AA165442, AA165443, | |
| | NO: 84, b is an integer of 15 to 1513, where both a and | AA167837, AA166621, AA166924, AA195339, AA195338, AA252790 | |
| | b correspond to the positions of nucleotide residues | | |
| | shown in SEQ ID NO: 84, and where b is greater than | | |
| | or equal to a + 14. | | |
| 757815 | Preferably excluded from the present invention are | | |
| | one or more polynucleotides comprising a nucleotide | | |
| | sequence described by the general formula of a − b, | | |
| | where a is any integer between 1 to 1284 of SEQ ID | | |
| | NO: 85, b is an integer of 15 to 1298, where both a and | | |
| | b correspond to the positions of nucleotide residues | | |
| | shown in SEQ ID NO: 85, and where b is greater than | | |
| | or equal to a + 14. | | |
| 759878 | Preferably excluded from the present invention are | | |
| | one or more polynucleotides comprising a nucleotide | | |
| | sequence described by the general formula of a − b, | | |
| | where a is any integer between 1 to 1995 of SEQ ID | | |
| | NO: 86, b is an integer of 15 to 2009, where both a and | | |
| | b correspond to the positions of nucleotide residues | | |
| | shown in SEQ ID NO: 86, and where b is greater than | | |
| | or equal to a + 14. | | |
| 760227 | Preferably excluded from the present invention are | | |
| | one or more polynucleotides comprising a nucleotide | | |
| | sequence described by the general formula of a − b, | | |
| | where a is any integer between 1 to 520 of SEQ ID | | |
| | NO: 87, b is an integer of 15 to 534, where both a and | | |
| | b correspond to the positions of nucleotide residues | | |
| | shown in SEQ ID NO: 87, and where b is greater than | | |
| | or equal to a + 14. | | |
| 760312 | Preferably excluded from the present invention are | | |
| | one or more polynucleotides comprising a nucleotide | | |
| | sequence described by the general formula of a − b, | | |
| | where a is any integer between 1 to 4288 of SEQ ID | | |
| | NO: 88, b is an integer of 15 to 4302, where both a and | | |
| | b correspond to the positions of nucleotide residues | | |
| | shown in SEQ ID NO: 88, and where b is greater than | | |
| | or equal to a + 14. | | |
| 766051 | Preferably excluded from the present invention are | T57753, T60650, R11036, R11084, R00826, R01482, H87221, N25112, N33451, | |
| | one or more polynucleotides comprising a nucleotide | N42424, N47338, N48186, N62628, N68902, N71490, N78399, N99533, W16943, | |
| | sequence described by the general formula of a − b, | W78948, W85915, W95743, N89568, AA039230, AA039231, AA047564, AA047582, | |
| | where a is any integer between 1 to 2768 of SEQ ID | A047702, AA047752, AA120926, AA126453, AA135549, AA135529, AA429718 | |
| | NO: 89, b is an integer of 15 to 2782, where both a and | | |
| | b correspond to the positions of nucleotide residues | | |
| | shown in SEQ ID NO: 89, and where b is greater than | | |
| | or equal to a + 14. | | |
| 767593 | Preferably excluded from the present invention are | T51635, T57709, T61468, T63793, T63818, T92894, T92984, T94396, T75475, T75508, | |
| | one or more polynucleotides comprising a nucleotide | T87575, T79848, T85949, R25644, R27489, R70702, R78772, H44836, H44835, R84349, | |
| | sequence described by the general formula of a − b, | R86157, R89703, R99494, H48567, H48836, H57859, H83579, H86373, H86690, | |
| | where a is any integer between 1 to 1023 of SEQ ID | H88284, H97937, H98241, H99117, H99249, N24363, N24573, N26374, N27129, | |
| | NO: 90, b is an integer of 15 to 1037, where both a and | N31662, N36546, N40064, N45098, N45108, N53503, N59526, N63219, N64179, | |
| | b correspond to the positions of nucleotide residues | N64178, N66660, N70536, N72298, N98943, W02894, W19364, W60295, W60386, | |
| | shown in SEQ ID NO: 90, and where b is greater than | W72691, W77806, W93582, W93631, W92326, W92382, N90765, AA001997, | |
| | or equal to a + 14. | AA013356, AA017023, AA017221, AA018780, AA026639, AA026705, AA029569, | |
| | | AA029496, AA029736, AA035387, AA035694, AA044958, AA055558, AA063564, | |
| | | AA100726, AA100744, AA134118, AA130301, AA151965, AA233192, AA253060, | |
| | | AA253117 | |
| 768053 | Preferably excluded from the present invention are | | |
| | one or more polynucleotides comprising a nucleotide | | |
| | sequence described by the general formula of a − b, | | |
| | where a is any integer between 1 to 1038 of SEQ ID | | |
| | NO: 91, b is an integer of 15 to 1052, where both a and | | |
| | b correspond to the positions of nucleotide residues | | |
| | shown in SEQ ID NO: 91, and where b is greater than | | |
| | or equal to a + 14. | | |
| 768055 | Preferably excluded from the present invention are | T68053, R09316, R09788, T84929, R24826, R66259, R68879, R80029, H00967, | |
| | one or more polynucleotides comprising a nucleotide | H89841, H96162, N39802, N44634, N68319, N70487, N71145, N72732, W01594, | |
| | sequence described by the general formula of a − b, | W52285, W73342, W85800, AA022906, AA022975, AA031962, AA032044, AA032163, | |
| | where a is any integer between 1 to 1220 of SEQ ID | AA037604, AA043694, AA043695, AA044134, AA074287, AA081041, AAO81042, | |
| | NO: 92, b is an integer of 15 to 1234, where both a and | AA082218, AA082461, AA082475, AA083977, AA100460, AA155926, AA167365, | |
| | correspond to the positions of nucleotide residues | AA171958, AA173534, AA187036, AA224429 | |
| | shown in SEQ ID NO: 92, and where b is greater than | | |
| | or equal to a + 14. | | |
| 769685 | Preferably excluded from the present invention are | | |
| | one or more polynucleotides comprising a nucleotide | | |
| | sequence described by the general formula of a − b, | | |
| | where a is any integer between 1 to 1557 of SEQ ID | | |
| | NO: 93, b is an integer of 15 to 1571, where both a and | | |
| | b correspond to the positions of nucleotide residues | | |
| | shown in SEQ ID NO: 93, and where b is greater than | | |
| | or equal to a + 14. | | |
| 771920 | Preferably excluded from the present invention are | | |
| | one or more polynucleotides comprising a nucleotide | | |
| | sequence described by the general formula of a − b, | | |
| | where a is any integer between 1 to 1858 of SEQ ID | | |
| | NO: 94, b is an integer of 15 to 1872, where both a and | | |
| | b correspond to the positions of nucleotide residues | | |
| | shown in SEQ ID NO: 94, and where b is greater than | | |
| | or equal to a + 14. | | |
| 772790 | Preferably excluded from the present invention are | | |
| | one or more polynucleotides comprising a nucleotide | | |
| | sequence described by the general formula of a − b, | | |
| | where a is any integer between 1 to 1502 of SEQ ID | | |
| | NO: 95, b is an integer of 15 to 1516, where both a and | | |
| | b correspond to the positions of nucleotide residues | | |
| | shown in SEQ ID NO: 95, and where b is greater than | | |
| | or equal to a + 14. | | |
| 772916 | Preferably excluded from the present invention are | | |
| | one or more polynucleotides comprising a nucleotide | | |
| | sequence described by the general formula of a − b, | | |
| | where a is any integer between 1 to 1756 of SEQ ID | | |
| | NO: 96, b is an integer of 15 to 1770, where both a and | | |
| | b correspond to the positions of nucleotide residues | | |
| | shown in SEQ ID NO: 96, and where b is greater than | | |
| | or equal to a + 14. | | |
| 773225 | Preferably excluded from the present invention are | | |
| | one or more polynucleotides comprising a nucleotide | | |
| | sequence described by the general formula of a − b, | | |
| | where a is any integer between 1 to 924 of SEQ ID | | |
| | NO: 97, b is an integer of 15 to 938, where both a and | | |
| | b correspond to the positions of nucleotide residues | | |
| | shown in SEQ ID NO: 97, and where b is greater than | | |
| | or equal to a + 14. | | |
| 773632 | Preferably excluded from the present invention are | | |
| | one or more polynucleotides comprising a nucleotide | | |
| | sequence described by the general formula of a − b, | | |
| | where a is any integer between 1 to 297 of SEQ ID | | |
| | NO: 98, b is an integer of 15 to 311, where both a and | | |
| | b correspond to the positions of nucleotide residues | | |
| | shown in SEQ ID NO: 98, and where b is greater than | | |
| | or equal to a + 14. | | |
| 774364 | Preferably excluded from the present invention are | W01405, AA172322 | |
| | one or more polynucleotides comprising a nucleotide | | |
| | sequence described by the general formula of a − b, | | |
| | where a is any integer between 1 to 606 of SEQ ID | | |
| | NO: 99, b is an integer of 15 to 620, where both a and | | |
| | b correspond to the positions of nucleotide residues | | |
| | shown in SEQ ID NO: 99, and where b is greater than | | |
| | or equal to a + 14. | | |
| 775355 | Preferably excluded from the present invention are | T49285, T61774, T68350, T68396, T94414, T69842, T81078, R01216, R05674, R21522 | |
| | one or more polynucleotides comprising a nucleotide | R21626, R23745, R23797, R24081, R24137, R24753, R32662, R36359, R45484, | |
| | sequence described by the general formula of a − b, | R45484, R63380, R63433, R70942, R70995, R73973, R78964, H08973, H09543, | |
| | where a is any integer between 1 to 2497 of SEQ ID | H16712, H16713, H20846, H20896, R99241, H82276, H82382, H84715, H85367, | |
| | NO: 100, b is an integer of 15 to 2511, where both a | H85516, H89615, H95047, H96450, H97881, N20953, N21537, N22201, N25769, | |
| | and b correspond to the positions of nucleotide | N29477, N30442, N37087, N42334, N42354, N66424, N66864, N67873, N71242, | |
| | residues shown in SEQ ID NO: 100, and where b is | N73740, N94555, N99903, W45394, W46993, W46961, W46960, W46881, W73247, | |
| | greater than or equal to a + 14. | W90778, AA026678, AA026215, AA043908, AA044414, AA042828, AA062957, | |
| | | AA076063, AA121145, AA121476, AA195131, AA234043, AA234044, AA426421 | |
| 775844 | Preferably excluded from the present invention are | T73286, T66741, T66742, R12147, R15080, R19321, R39271, R42973, R44589, R44589, | |
| | one or more polynucleotides comprising a nucleotide | H06197, H08725, R94752, H71652, H71653, H79764, H79765, H79770, H79762, | |
| | sequence described by the general formula of a − b, | H79761, H79771, H92246, H96184, N45199, W93244, W93245, W93258, W93257, | |
| | where a is any integer between 1 to 2967 of SEQ ID | W94615, W94654, AA001180, AA039582, AA039689, AA082198, AA157370, | |
| | NO: 101, b is an integer of 15 to 2981, where both a | AA157869, AA253368 | |
| | and b correspond to the positions of nucleotide | | |
| | residues shown in SEQ ID NO: 101, and where b is | | |
| | greater than or equal to a + 14. | | |
| 777760 | Preferably excluded from the present invention are | | |
| | one or more polynucleotides comprising a nucleotide | | |
| | sequence described by the general formula of a − b, | | |
| | where a is any integer between 1 to 2790 of SEQ ID | | |
| | NO: 102, b is an integer of 15 to 2804, where both a | | |
| | and b correspond to the positions of nucleotide | | |
| | residues shown in SEQ ID NO: 102, and where b is | | |
| | greater than or equal to a + 14. | | |
| 779837 | Preferably excluded from the present invention are | T67628, T72838, H59238, H84693, N80048, W07009, W37555, W39191, N90251, | |
| | one or more polynucleotides comprising a nucleotide | AA057629 | |
| | sequence described by the general formula of a − b, | | |
| | where a is any integer between 1 to 708 of SEQ ID | | |
| | NO: 103, b is an integer of 15 to 722, where both a and | | |
| | b correspond to the positions of nucleotide residues | | |
| | shown in SEQ ID NO: 103, and where b is greater than | | |
| | or equal to a + 14. | | |
| 780769 | Preferably excluded from the present invention are | T66609, T66610, T83560, R15983, R15984, R35702, R49338, R49338, H11613, R94244, | |
| | one or more polynucleotides comprising a nucleotide | H87098, H87745, W60710, W60772, W94034, AA258151, AA258913, AA425943 | |
| | sequence described by the general formula of a − b, | | |
| | where a is any integer between 1 to 1622 of SEQ ID | | |
| | NO: 104, b is an integer of 15 to 1636, where both a | | |
| | and b correspond to the positions of nucleotide | | |
| | residues shown in SEQ ID NO: 104, and where b is | | |
| | greater than or equal to a + 14. | | |
| 781445 | Preferably excluded from the present invention are | | |
| | one or more polynucleotides comprising a nucleotide | | |
| | sequence described by the general formula of a − b, | | |
| | where a is any integer between 1 to 1547 of SEQ ID | | |
| | NO: 105, b is an integer of 15 to 1561, where both a | | |
| | and b correspond to the positions of nucleotide | | |
| | residues shown in SEQ ID NO: 105, and where b is | | |
| | greater than or equal to a + 14. | | |
| 781531 | Preferably excluded from the present invention are | | |
| | one or more polynucleotides comprising a nucleotide | | |
| | sequence described by the general formula of a − b, | | |
| | where a is any integer between 1 to 472 of SEQ ID | | |
| | NO: 106, b is an integer of 15 to 486, where both a and | | |
| | b correspond to the positions of nucleotide residues | | |
| | shown in SEQ ID NO: 106, and where b is greater than | | |
| | or equal to a + 14. | | |
| 783018 | Preferably excluded from the present invention are | R18976 | |
| | one or more polynucleotides comprising a nucleotide | | |
| | sequence described by the general formula of a − b, | | |
| | where a is any integer between 1 to 786 of SEQ ID | | |
| | NO: 107, b is an integer of 15 to 800, where both a and | | |
| | b correspond to the positions of nucleotide residues | | |
| | shown in SEQ ID NO: 107, and where b is greater than | | |
| | or equal to a + 14. | | |
| 783097 | Preferably excluded from the present invention are | | |
| | one or more polynucleotides comprising a nucleotide | | |
| | sequence described by the general formula of a − b, | | |
| | where a is any integer between 1 to 1044 of SEQ ID | | |
| | NO: 108, b is an integer of 15 to 1058, where both a | | |
| | and b correspond to the positions of nucleotide | | |
| | residues shown in SEQ ID NO: 108, and where b is | | |
| | greater than or equal to a + 14. | | |
| 784198 | Preferably excluded from the present invention are | | |
| | one or more polynucleotides comprising a nucleotide | | |
| | sequence described by the general formula of a − b, | | |
| | where a is any integer between 1 to 1062 of SEQ ID | | |
| | NO: 109, b is an integer of 15 to 1076, where both a | | |
| | and b correspond to the positions of nucleotide | | |
| | residues shown in SEQ ID NO: 109, and where b is | | |
| | greater than or equal to a + 14. | | |
| 784868 | Preferably excluded from the present invention are | | |
| | one or more polynucleotides comprising a nucleotide | | |
| | sequence described by the general formula of a − b, | | |
| | where a is any integer between 1 to 1185 of SEQ ID | | |
| | NO: 110, b is an integer of 15 to 1199, where both a | | |
| | and b correspond to the positions of nucleotide | | |
| | residues shown in SEQ ID NO: 110, and where b is | | |
| | greater than or equal to a + 14. | | |
| 785428 | Preferably excluded from the present invention are | T47751, T39348, T39359, T98137, T79193, T95760, R16653, R16654, R24052, R24245, | |
| | one or more polynucleotides comprising a nucleotide | R33230, R44846, R50794, R50912, R44846, R60930, R61049, R71116, R71620, | |
| | sequence described by the general formula of a − b, | R77888, R80860, H00109, H04333, H04688, H05041, H09555, H30257, H30320, | |
| | where a is any integer between 1 to 3616 of SEQ ID | H47931, R94218, R99062, R99260, H50702, H50803, H52629, H52628, H54000, | |
| | NO: 111, b is an integer of 15 to 3630, where both a | H67115, H70269, H83460, H83572, H84911, H99358, N21482, N21632, N24626, | |
| | and b correspond to the positions of nucleotide | N33762, N41609, N67949, N69593, N70188, N71452, N71818, N77888, N79031, | |
| | residues shown in SEQ ID NO: 111, and where b is | N99501, W02150, W03072, W05781, W19647, W19972, W20125, W30896, W33043, | |
| | greater than or equal to a + 14. | W33197, W35407, W37262, W39072, W47654, W52846, W56143, W60064, W60074, | |
| | | W65501, W67522, W67591, W69745, W69926, W80811, W94093, W94156, N90996, | |
| | | AA039462, AA040857, AA043084, AA043810, AA053423, AA053042, AA064625, | |
| | | AA064709, AA11554O, AA115051, AA120833, AA129500, AA129499, AA146736, | |
| | | AA148602, AA152314, AA150343, AA150620, AA150790, AA157282, AA160296, | |
| | | AA173937, AA173969, AA181340, AA188207, AA186354, AA188646, AA190484, | |
| | | AA199676, AA199677, AA243342, AA250981, AA459647, AA459773, AA460227 | |
| 785845 | Preferably excluded from the present invention are | | |
| | one or more polynucleotides comprising a nucleotide | | |
| | sequence described by the general formula of a − b, | | |
| | where a is any integer between 1 to 1512 of SEQ ID | | |
| | NO: 112, b is an integer of 15 to 1526, where both a | | |
| | and b correspond to the positions of nucleotide | | |
| | residues shown in SEQ ID NO: 112, and where b is | | |
| | greater than or equal to a + 14. | | |
| 785854 | Preferably excluded from the present invention are | T85881, W45204 | |
| | one or more polynucleotides comprising a nucleotide | | |
| | sequence described by the general formula of a − b, | | |
| | where a is any integer between 1 to 571 of SEQ ID | | |
| | NO: 113, b is an integer of 15 to 585, where both a and | | |
| | b correspond to the positions of nucleotide residues | | |
| | shown in SEQ ID NO: 113, and where b is greater than | | |
| | or equal to a + 14. | | |
| 786705 | Preferably excluded from the present invention are | R09422 | |
| | one or more polynucleotides comprising a nucleotide | | |
| | sequence described by the general formula of a − b, | | |
| | where a is any integer between 1 to 487 of SEQ ID | | |
| | NO: 114, b is an integer of 15 to 501, where both a and | | |
| | b correspond to the positions of nucleotide residues | | |
| | shown in SEQ ID NO: 114, and where b is greater than | | |
| | or equal to a + 14. | | |
| 787186 | Preferably excluded from the present invention are | | |
| | one or more polynucleotides comprising a nucleotide | | |
| | sequence described by the general formula of a − b, | | |
| | where a is any integer between 1 to 1951 of SEQ ID | | |
| | NO: 115, b is an integer of 15 to 1965, where both a | | |
| | and b correspond to the positions of nucleotide | | |
| | residues shown in SEQ ID NO: 115, and where b is | | |
| | greater than or equal to a + 14. | | |
| 787279 | Preferably excluded from the present invention are | T62081, T97170, R17585, R42923, R48789, R48896, R54561, R54562, R54721, R54722, | |
| | one or more polynucleotides comprising a nucleotide | R42923, R72984, R73595, H23901, H43508, H46275, H46348, H47255, H47254, | |
| | sequence described by the general formula of a − b, | R83475, R89352, R91048, R93150, R93669, R94520, R98839, H48417, H48899, | |
| | where a is any integer between 1 to 1046 of SEQ ID | H48900, H50560, H54157, H58936, H58983, H67630, H69455, H72554, H72955, | |
| | NO: 116, b is an integer of 15 to 1060, where both a | H89822, N23388, N33070, N35168, N40256, N44641, N52556, N59706, N68387, | |
| | and b correspond to the positions of nucleotide | N80806, N92514, W17007, W19578, W20217, W38835, W49822, W56061, W65416, | |
| | residues shown in SEQ ID NO: 116, and where b is | W65285, N90575, AA002190, AA045344, AA045446, AA052950, AA053432, | |
| | greater than or equal to a + 14. | AA082245, AA083753, AA102071, AA099961, AA101574, AA112070, AA125782, | |
| | | AA125931, AA135139, AA135268, AA146635, AA151603, AA149484, AA149981, | |
| | | AA152120, AA171975, AA172123, AA181805, AA181821, AA188148, AA188225, | |
| | | AA186556, AA186917, AA460297, AA461585 | |
| 789002 | Preferably excluded from the present invention are | | |
| | one or more polynucleotides comprising a nucleotide | | |
| | sequence described by the general formula of a − b, | | |
| | where a is any integer between 1 to 695 of SEQ ID | | |
| | NO: 117, b is an integer of 15 to 709, where both a and | | |
| | b correspond to the positions of nucleotide residues | | |
| | shown in SEQ ID NO: 117, and where b is greater than | | |
| | or equal to a + 14. | | |
| 789008 | Preferably excluded from the present invention are | T47492, T47493, T47900, T48303, T48445, T48456, T49007, T49079, T49080, T49218, | |
| | one or more polynucleotides comprising a nucleotide | T49310, T49311, T49913, T49914, T49941, T51256, T51337, T51371, T51423, T51604, | |
| | sequence described by the general formula of a − b, | T51757, T52271, T52400, T53326, T53327, T54148, T54244, T54295, T54330, T54402, | |
| | where a is any integer between 1 to 2039 of SEQ ID | T54407, T55485, T55733, T56237, T56379, T56414, T56565, T39384, T40546, T40551, | |
| | NO: 118, b is an integer of 15 to 2053, where both a | T40552, T40824, T89603, T79470, T79561, R01378, R12635, R20536, R21209, R21238, | |
| | and b correspond to the positions of nucleotide | R21239, R22062, R22119, R22190, R22241, R22534, R22535, R22823, R23625, | |
| | residues shown in SEQ ID NO: 118, and where b is | R23881, R24090, R25741, R26431, R26587, R28327, R28328, R28330, R31619, | |
| | greater than or equal to a + 14. | R32132, R32349, R33134, R33286, R35454, R36658, R39739, R50498, R50581, | |
| | | R20536, R56656, R65717, R65777, R65870, R67856, R67857, R68076, R69399, | |
| | | R69531, R69752, R69920, R71289, R72350, R74061, R77148, R77149, R80495, | |
| | | R80640, R82550, H00862, H01301, H01472, H01571, H02637, H02893, H03072, | |
| | | H03073, H03443, H03525, H03812, H03836, H23457, H23458, H26513, H26583, | |
| | | H26584, R86226, R86227, R87053, R91130, R91174, R92513, R92642, R93418, | |
| | | R93468, R93700, R94462, R94463, R94793, R95110, R96330, R96329, R96675, | |
| | | R96943, R97000, R98195, R99857, H48277, H48366, H48451, H53119, H54247, | |
| | | H54246, H57144, H57217, H58791, H59276, H59324, H59614, H59654, H62873, | |
| | | H62997, H66302, H67109, H67468, H67594, H67634, H67646, H67685, H67891, | |
| | | H67935, H68007, H68476, H72996, H73208, H73882, H74057, H74076, H74196, | |
| | | H75522, H75366, H77704, H77705, H78593, H79262, H79373, H81287, H81343, | |
| | | H82036, H82218, H82313, H87010, H87011, H90552, H90551, H93198, H94403, | |
| | | N28269, N30773, N34862, N38975, N38989, N39317, N43935, N45164, N48122, | |
| | | N48136, N50666, N50756, N52570, N53559, N53589, N55006, N55026, N57654, | |
| | | N58258, N58340, N58627, N58738, N70218, N72552, N72649, N77216, N77511, | |
| | | N77635, N80637, W01074, W58701, W68231, W68232, W68700, W72561, W72580, | |
| | | W72399, W76223, W85725, W92304, W92318, W92144, W92354, AA004478, | |
| | | AA004551, AA009715, AA009825, AA024464, AA024465, AA025660, AA039523, | |
| | | AA039522, AA040081, AA040128, AA040033, AA040827, AA045744, AA053323, | |
| | | AA099152, AA099250 | |
| 789555 | Preferably excluded from the present invention are | T85669, H62189, H62190, H73963, H73295, N74147, W04314, W23625, W35215, | |
| | one or more polynucleotides comprising a nucleotide | AA040573, AA040671 | |
| | sequence described by the general formula of a − b, | | |
| | where a is any integer between 1 to 1810 of SEQ ID | | |
| | NO: 119, b is an integer of 15 to 1824, where both a | | |
| | and b correspond to the positions of nucleotide | | |
| | residues shown in SEQ ID NO: 119, and where b is | | |
| | greater than or equal to a + 14. | | |
| 789631 | Preferably excluded from the present invention are | | |
| | one or more polynucleotides comprising a nucleotide | | |
| | sequence described by the general formula of a − b, | | |
| | where a is any integer between 1 to 592 of SEQ ID | | |
| | NO: 120, b is an integer of 15 to 606, where both a and | | |
| | b correspond to the positions of nucleotide residues | | |
| | shown in SEQ ID NO: 120, and where b is greater than | | |
| | or equal to a + 14. | | |
| 789779 | Preferably excluded from the present invention are | N69694, AA151932 | |
| | one or more polynucleotides comprising a nucleotide | | |
| | sequence described by the general formula of a − b, | | |
| | where a is any integer between 1 to 824 of SEQ ID | | |
| | NO: 121, b is an integer of 15 to 838, where both a and | | |
| | b correspond to the positions of nucleotide residues | | |
| | shown in SEQ ID NO: 121, and where b is greater than | | |
| | or equal to a + 14. | | |
| 790387 | Preferably excluded from the present invention are | H19654, H87102, H87749, N29354, N34298, N44187, N57052, W69612, W93844, | |
| | one or more polynucleotides comprising a nucleotide | W93865, AA027893, AA029638, AA058317, AA058495, AA179870, AA232827, | |
| | sequence described by the general formula of a − b, | A233881, AA235809 | |
| | where a is any integer between 1 to 642 of SEQ ID | | |
| | NO: 122, b is an integer of 15 to 656, where both a and | | |
| | b correspond to the positions of nucleotide residues | | |
| | shown in SEQ ID NO: 122, and where b is greater than | | |
| | or equal to a + 14. | | |
| 790461 | Preferably excluded from the present invention are | R66275, R76171, R82537, AA054476, AA056199, AA127010, AA143025, AA151006, | |
| | one or more polynucleotides comprising a nucleotide | AA150976 | |
| | sequence described by the general formula of a − b, | | |
| | where a is any integer between 1 to 1372 of SEQ ID | | |
| | NO: 123, b is an integer of 15 to 1386, where both a | | |
| | and b correspond to the positions of nucleotide | | |
| | residues shown in SEQ ID NO: 123, and where b is | | |
| | greater than or equal to a + 14. | | |
| 790931 | Preferably excluded from the present invention are | T92052, R10686, T84927, R21818, R22331, R22332, R22401, R23139, R23140, R23369, | |
| | one or more polynucleotides comprising a nucleotide | R32153, R32154, R63527, R63575, R68799, R68901, R80768, H12779, H12836, | |
| | sequence described by the general formula of a − b, | H56522, H56704, H94832, H96055, H96058, H96422, H96418, N26715, N27088, | |
| | where a is any integer between ito 831 of SEQ ID | N31910, N32532, N33383, N34596, N42693, N42748, W32121, W37432, W44577, | |
| | NO: 124, b is an integer of 15 to 845, where both a and | W44627, W51792, W61294, W65390, AA026773, AA026774 | |
| | b correspond to the positions of nucleotide residues | | |
| | shown in SEQ ID NO: 124, and where b is greater than | | |
| | or equal to a + 14. | | |
| 791176 | Preferably excluded from the present invention are | T51708, T51919, T69384, R50942, R73632, R73706, H28125, N22822, N78722 | |
| | one or more polynucleotides comprising a nucleotide | | |
| | sequence described by the general formula of a − b, | | |
| | where a is any integer between 1 to 1642 of SEQ ID | | |
| | NO: 125, b is an integer of 15 to 1656, where both a | | |
| | and b correspond to the positions of nucleotide | | |
| | residues shown in SEQ ID NO: 125, and where b is | | |
| | greater than or equal to a + 14. | | |
| 791983 | Preferably excluded from the present invention are | | |
| | one or more polynucleotides comprising a nucleotide | | |
| | sequence described by the general formula of a − b, | | |
| | where a is any integer between 1 to 823 of SEQ ID | | |
| | NO: 126, b is an integer of 15 to 837, where both a and | | |
| | b correspond to the positions of nucleotide residues | | |
| | shown in SEQ ID NO: 126, and where b is greater than | | |
| | or equal to a + 14. | | |
| 792539 | Preferably excluded from the present invention are | H53623, H53662, N23079, N69293, N89689, AA034518, AA035409, AA035410, | |
| | one or more polynucleotides comprising a nucleotide | AA046490, AA046762, AA085037, AA085105, AA134976, AA135078, AA459951, | |
| | sequence described by the general formula of a − b, | AA460040 | |
| | where a is any integer between 1 to 1203 of SEQ ID | | |
| | NO: 127, b is an integer of 15 to 1217, where both a | | |
| | and b correspond to the positions of nucleotide | | |
| | residues shown in SEQ ID NO: 127, and where b is | | |
| | greater than or equal to a + 14. | | |
| 792749 | Preferably excluded from the present invention are | R13058, R13951, R40011, R51765, R51766, R40011, R67629, R67630, H01808, | |
| | one or more polynucleotides comprising a nucleotide | H29310, H29403, R99196, H52742, H52788, H61636, H71767, H71768, N20919, | |
| | sequence described by the general formula of a − b, | N27779, N36030, N41741, N47900, N55480, N76967, W21551, W44410, W44331, | |
| | where a is any integer between 1 to 1335 of SEQ ID | W46458, W46528, W46810, W46928, W51766, W57869, W58140, W86456, N90422, | |
| | NO: 128, b is an integer of 15 to 1349, where both a | A029174, AA029253, AA031374, AA031375, AA062913, AA082549, AA133965, | |
| | and b correspond to the positions of nucleotide | AA167773, AA166872, AA176295, AA176395, AA428235 | |
| | residues shown in SEQ ID NO: 128, and where b is | | |
| | greater than or equal to a + 14. | | |
| 792961 | Preferably excluded from the present invention are | | |
| | one or more polynucleotides comprising a nucleotide | | |
| | sequence described by the general formula of a − b, | | |
| | where a is any integer between 1 to 2304 of SEQ ID | | |
| | NO: 129, b is an integer of 15 to 2318, where both a | | |
| | and b correspond to the positions of nucleotide | | |
| | residues shown in SEQ ID NO: 129, and where b is | | |
| | greater than or equal to a + 14. | | |
| 793206 | Preferably excluded from the present invention are | | |
| | one or more polynucleotides comprising a nucleotide | | |
| | sequence described by the general formula of a − b, | | |
| | where a is any integer between 1 to 2135 of SEQ ID | | |
| | NO: 130, b is an integer of 15 to 2149, where both a | | |
| | and b correspond to the positions of nucleotide | | |
| | residues shown in SEQ ID NO: 130, and where b is | | |
| | greater than or equal to a + 14. | | |
| 793249 | Preferably excluded from the present invention are | T48358, T48359, T71001, T71063, T72193, T72972, T67531, T69528, T86709, T86804, | |
| | one or more polynucleotides comprising a nucleotide | T89854, T90890, T91159, T85694, T85895, T95466, T95467, R00007, R00008, R12353, | |
| | sequence described by the general formula of a − b, | R23932, R23933, R37279, R63973, R64080, R73825, R73826, R76905, R77073, | |
| | where a is any integer between 1 to 1006 of SEQ ID | R77445, R77538, R79797, R79808, R79894, R79908, H11925, H11926, H15192, | |
| | NO: 131, b is an integer of 15 to 1020, where both a | H16754, H16862, H19737, H20072, H21725, H22675, H24523, H26125, H26391, | |
| | and b correspond to the positions of nucleotide | H39766, H41271, H41373, H41374, H43544, H43545, H44881, H45180, H45181, | |
| | residues shown in SEQ ID NO: 131, and where b is | R92671, R94833, H57801, H58122, H58123, H62248, H62337, H69587, H69586, | |
| | greater than or equal to a + 14. | H80840, H80930, H85462, H85747, H86829, H86902, H96591, H96708, H97829, | |
| | | H99614, N25266, N26147, N27161, N29792, N33452, N33767, N33906, N36535, | |
| | | N38816, N39177, N40101, N42935, N42425, N44530, N45252, N45445, N57801, | |
| | | N59012, N78685, N79046, N91819, N98480, W02726, W04566, W15191, W15596, | |
| | | W17335, W24253, W25723, W30937, W31253, W31429, W31674, W39685, W44989, | |
| | | W46619, W46654, W57768, W57804, W57841, W57622, W67135, W67136, W73878, | |
| | | W73364, W73441, W77815, W80810, W80903, W92682, W92512, W92513, W96375, | |
| | | W96526, AA001447, AA001482, AA021374, AA021375, AA037268, AA037489, | |
| | | A037569, AA039708, AA040262, AA040417, AA057011, AA074646, AA074679, | |
| | | AA075303, AA088467, AA098947, AA100987, AA126026, AA126122, AA126778, | |
| | | AA128010, AA128034, AA136619, AA136750, AA143234, AA143291, AA143564, | |
| | | AA143565, AA146915, AA151446, AA151447, AA156218, AA157383, AA159151, | |
| | | AA173294, AA179768, AA180442, AA181155, AA181156, AA181722, AA186611, | |
| | | AA188254, AA190686, AA191758, AA191547, AA195441, AA223540, AA223587 | |
| 793626 | Preferably excluded from the present invention are | | |
| | one or more polynucleotides comprising a nucleotide | | |
| | sequence described by the general formula of a − b, | | |
| | where a is any integer between 1 to 2305 of SEQ ID | | |
| | NO: 132, b is an integer of 15 to 2319, where both a | | |
| | and b correspond to the positions of nucleotide | | |
| | residues shown in SEQ ID NO: 132, and where b is | | |
| | greater than or equal to a + 14. | | |
| 794417 | Preferably excluded from the present invention are | | |
| | one or more polynucleotides comprising a nucleotide | | |
| | sequence described by the general formula of a − b, | | |
| | where a is any integer between 1 to 1359 of SEQ ID | | |
| | NO: 133, b is an integer of 15 to 1373, where both a | | |
| | and b correspond to the positions of nucleotide | | |
| | residues shown in SEQ ID NO: 133, and where b is | | |
| | greater than or equal to a + 14. | | |
| 795197 | Preferably excluded from the present invention are | | |
| | one or more polynucleotides comprising a nucleotide | | |
| | sequence described by the general formula of a − b, | | |
| | where a is any integer between 1 to 1643 of SEQ ID | | |
| | NO: 134, b is an integer of 15 to 1657, where both a | | |
| | and b correspond to the positions of nucleotide | | |
| | residues shown in SEQ ID NO: 134, and where b is | | |
| | greater than or equal to a + 14. | | |
| 795251 | Preferably excluded from the present invention are | T89826, T74514, T89080, R24028, H03686, H97493, N54611, W94797, W94798, | |
| | one or more polynucleotides comprising a nucleotide | AA129537, AA190765, AA191357, AA256363, AA425151, AA429405 | |
| | sequence described by the general formula of a − b, | | |
| | where a is any integer between 1 to 2346 of SEQ ID | | |
| | NO: 135, b is an integer of 15 to 2360, where both a | | |
| | and b correspond to the positions of nucleotide | | |
| | residues shown in SEQ ID NO: 135, and where b is | | |
| | greater than or equal to a + 14. | | |
| 795752 | Preferably excluded from the present invention are | | |
| | one or more polynucleotides comprising a nucleotide | | |
| | sequence described by the general formula of a − b, | | |
| | where a is any integer between 1 to 1028 of SEQ ID | | |
| | NO: 136, b is an integer of 15 to 1042, where both a | | |
| | and b correspond to the positions of nucleotide | | |
| | residues shown in SEQ ID NO: 136, and where b is | | |
| | greater than or equal to a + 14. | | |
| 796261 | Preferably excluded from the present invention are | | |
| | one or more polynucleotides comprising a nucleotide | | |
| | sequence described by the general formula of a − b, | | |
| | where a is any integer between 1 to 1023 of SEQ ID | | |
| | NO: 137, b is an integer of 15 to 1037, where both a | | |
| | and b correspond to the positions of nucleotide | | |
| | residues shown in SEQ ID NO: 137, and where b is | | |
| | greater than or equal to a + 14. | | |
| 796933 | Preferably excluded from the present invention are | | |
| | one or more polynucleotides comprising a nucleotide | | |
| | sequence described by the general formula of a − b, | | |
| | where a is any integer between 1 to 1476 of SEQ ID | | |
| | NO: 138, b is an integer of 15 to 1490, where both a | | |
| | and b correspond to the positions of nucleotide | | |
| | residues shown in SEQ ID NO: 138, and where b is | | |
| | greater than or equal to a + 14. | | |
| 799424 | Preferably excluded from the present invention are | | |
| | one or more polynucleotides comprising a nucleotide | | |
| | sequence described by the general formula of a − b, | | |
| | where a is any integer between 1 to 1670 of SEQ ID | | |
| | NO: 139, b is an integer of 15 to 1684, where both a | | |
| | and b correspond to the positions of nucleotide | | |
| | residues shown in SEQ ID NO: 139, and where b is | | |
| | greater than or equal to a + 14. | | |
| 799698 | Preferably excluded from the present invention are | | |
| | one or more polynucleotides comprising a nucleotide | | |
| | sequence described by the general formula of a − b, | | |
| | where a is any integer between 1 to 413 of SEQ ID | | |
| | NO: 140, b is an integer of 15 to 427, where both a and | | |
| | b correspond to the positions of nucleotide residues | | |
| | shown in SEQ ID NO: 140, and where b is greater than | | |
| | or equal to a + 14. | | |
| 800351 | Preferably excluded from the present invention are | | |
| | one or more polynucleotides comprising a nucleotide | | |
| | sequence described by the general formula of a − b, | | |
| | where a is any integer between 1 to 875 of SEQ ID | | |
| | NO: 141, b is an integer of 15 to 889, where both a and | | |
| | b correspond to the positions of nucleotide residues | | |
| | shown in SEQ ID NO: 141, and where b is greater than | | |
| | or equal to a + 14. | | |
| 800573 | Preferably excluded from the present invention are | | |
| | one or more polynucleotides comprising a nucleotide | | |
| | sequence described by the general formula of a − b, | | |
| | where a is any integer between 1 to 1491 of SEQ ID | | |
| | NO: 142, b is an integer of 15 to 1505, where both a | | |
| | and b correspond to the positions of nucleotide | | |
| | residues shown in SEQ ID NO: 142, and where b is | | |
| | greater than or equal to a + 14. | | |
| 805815 | Preferably excluded from the present invention are | | |
| | one or more polynucleotides comprising a nucleotide | | |
| | sequence described by the general formula of a − b, | | |
| | where a is any integer between 1 to 1221 of SEQ ID | | |
| | NO: 143, b is an integer of 15 to 1235, where both a | | |
| | and b correspond to the positions of nucleotide | | |
| | residues shown in SEQ ID NO: 143, and where b is | | |
| | greater than or equal to a + 14. | | |
| 806445 | Preferably excluded from the present invention are | | |
| | one or more polynucleotides comprising a nucleotide | | |
| | sequence described by the general formula of a − b, | | |
| | where a is any integer between 1 to 1406 of SEQ ID | | |
| | NO: 144, b is an integer of 15 to 1420, where both a | | |
| | and b correspond to the positions of nucleotide | | |
| | residues shown in SEQ ID NO: 144, and where b is | | |
| | greater than or equal to a + 14. | | |
| 810309 | Preferably excluded from the present invention are | | |
| | one or more polynucleotides comprising a nucleotide | | |
| | sequence described by the general formula of a − b, | | |
| | where a is any integer between 1 to 1905 of SEQ ID | | |
| | NO: 145, b is an integer of 15 to 1919, where both a | | |
| | and b correspond to the positions of nucleotide | | |
| | residues shown in SEQ ID NO: 145, and where b is | | |
| | greater than or equal to a + 14. | | |
| 811022 | Preferably excluded from the present invention are | | |
| | one or more polynucleotides comprising a nucleotide | | |
| | sequence described by the general formula of a − b, | | |
| | where a is any integer between 1 to 1365 of SEQ ID | | |
| | NO: 146, b is an integer of 15 to 1379, where both a | | |
| | and b correspond to the positions of nucleotide | | |
| | residues shown in SEQ ID NO: 146, and where b is | | |
| | greater than or equal to a + 14. | | |
| 811023 | Preferably excluded from the present invention are | | |
| | one or more polynucleotides comprising a nucleotide | | |
| | sequence described by the general formula of a − b, | | |
| | where a is any integer between 1 to 500 of SEQ ID | | |
| | NO: 147, b is an integer of 15 to 514, where both a and | | |
| | b correspond to the positions of nucleotide residues | | |
| | shown in SEQ ID NO: 147, and where b is greater than | | |
| | or equal to a + 14. | | |
| 811143 | Preferably excluded from the present invention are | | |
| | one or more polynucleotides comprising a nucleotide | | |
| | sequence described by the general formula of a − b, | | |
| | where a is any integer between 1 to 2044 of SEQ ID | | |
| | NO: 148, b is an integer of 15 to 2058, where both a | | |
| | and b correspond to the positions of nucleotide | | |
| | residues shown in SEQ ID NO: 148, and where b is | | |
| | greater than or equal to a + 14. | | |
| 811381 | Preferably excluded from the present invention are | | |
| | one or more polynucleotides comprising a nucleotide | | |
| | sequence described by the general formula of a − b, | | |
| | where a is any integer between 1 to 1767 of SEQ ID | | |
| | NO: 149, b is an integer of 15 to 1781, where both a | | |
| | and b correspond to the positions of nucleotide | | |
| | residues shown in SEQ ID NO: 149, and where b is | | |
| | greater than or equal to a + 14. | | |
| 811595 | Preferably excluded from the present invention are | T51013, T51104, T54094, T54185, T68577, T68655, T90261, T90702, T92691, R34639, | |
| | one or more polynucleotides comprising a nucleotide | R49168, R51392, R49168, R84952, R84994, H84723, H84890, N29820, N42512, | |
| | sequence described by the general formula of a − b, | N64677, N67206, N73458, N80110, N92710, W02861, W20327, W23680, W76675, | |
| | where a is any integer between 1 to 1695 of SEQ ID | AA031294, AA062736, AA062781, AA070243, AA070244, AA084464, AA100714, | |
| | NO: 150, b is an integer of 15 to 1709, where both a | AA100767, AA136726, AA136684, AA191613, AA223541, AA223589, AA252636 | |
| | and b correspond to the positions of nucleotide | | |
| | residues shown in SEQ ID NO: 150, and where b is | | |
| | greater than or equal to a + 14. | | |
| 813000 | Preferably excluded from the present invention are | | |
| | one or more polynucleotides comprising a nucleotide | | |
| | sequence described by the general formula of a − b, | | |
| | where a is any integer between 1 to 908 of SEQ ID | | |
| | NO: 151, b is an integer of 15 to 922, where both a and | | |
| | b correspond to the positions of nucleotide residues | | |
| | shown in SEQ ID NO: 151, and where b is greater than | | |
| | or equal to a + 14. | | |
| 813288 | Preferably excluded from the present invention are | | |
| | one or more polynucleotides comprising a nucleotide | | |
| | sequence described by the general formula of a − b, | | |
| | where a is any integer between 1 to 621 of SEQ ID | | |
| | NO: 152, b is an integer of 15 to 635, where both a and | | |
| | b correspond to the positions of nucleotide residues | | |
| | shown in SEQ ID NO: 152, and where b is greater than | | |
| | or equal to a + 14. | | |
| 813431 | Preferably excluded from the present invention are | T94237, T89464, T89552, R09285, T78 198, R14453, R15241, R15311, R21130, R33140, | |
| | one or more polynucleotides comprising a nucleotide | R33292, R40972, R46726, R42211, R40972, R46726, R66207, R67085, R73679, | |
| | sequence described by the general formula of a − b, | R73770, H12485, H19135, H22930, H24111, H26774, H26884, R89854, R89894, | |
| | where a is any integer between 1 to 2314 of SEQ ID | R92012, R92057, H53798, H61991, H61992, H64854, H65452, H73213, H74063, | |
| | NO: 153, b is an integer of 15 to 2328, where both a | H79753, H79754, H80620, H80654, H81209, H81210, H84019, H84020, N35581, | |
| | and b correspond to the positions of nucleotide | N68664, N73792, N91681, N92730, N99417, W20349, W46901, W52684, W60422, | |
| | residues shown in SEQ ID NO: 153, and where b is | W61136, W61108, W61174, W68119, W73989, W79021, W79231, W80414, W80777, | |
| | greater than or equal to a + 14. | W80930, AA040315, AA045023, AA045024, AA045188, AA045352, AA181735, | |
| | | AA181799, AA223229, AA223428, AA464186, AA464780, AA428152, AA430305 | |
| 813450 | Preferably excluded from the present invention are | T90954, T84401, T85262, R22109, R48652, R72000, R73453, H14261, H27403, | |
| | one or more polynucleotides comprising a nucleotide | H42017, H42018, H38149, H38150, H69302, H69397, N98775, AA148803, AA150212 | |
| | sequence described by the general formula of a − b, | | |
| | where a is any integer between 1 to 1254 of SEQ ID | | |
| | NO: 154, b is an integer of 15 to 1268, where both a | | |
| | and b correspond to the positions of nucleotide | | |
| | residues shown in SEQ ID NO: 154, and where b is | | |
| | greater than or equal to a + 14. | | |
| 813478 | Preferably excluded from the present invention are | | |
| | one or more polynucleotides comprising a nucleotide | | |
| | sequence described by the general formula of a −b, | | |
| | where a is any integer between 1 to 4285 of SEQ ID | | |
| | NO: 155, b is an integer of 15 to 4299, where both a | | |
| | and b correspond to the positions of nucleotide | | |
| | residues shown in SEQ ID NO: 155, and where b is | | |
| | greater than or equal to a + 14. | | |
| 813505 | Preferably excluded from the present invention are | | |
| | one or more polynucleotides comprising a nucleotide | | |
| | sequence described by the general formula of a − b, | | |
| | where a is any integer between 1 to 992 of SEQ ID | | |
| | NO: 156, b is an integer of 15 to 1006, where both a | | |
| | and b correspond to the positions of nucleotide | | |
| | residues shown in SEQ ID NO: 156, and where b is | | |
| | greater than or equal to a + 14. | | |
| 815552 | Preferably excluded from the present invention are | | |
| | one or more polynucleotides comprising a nucleotide | | |
| | sequence described by the general formula of a − b, | | |
| | where a is any integer between 1 to 1672 of SEQ ID | | |
| | NO: 157, b is an integer of 15 to 1686, where both a | | |
| | and b correspond to the positions of nucleotide | | |
| | residues shown in SEQ ID NO: 157, and where b is | | |
| | greater than or equal to a + 14. | | |
| 815606 | Preferably excluded from the present invention are | T69152, T69213, T80080, T80327, R19043, R27520, R38534, R38898, R44031, R44031, | |
| | one or more polynucleotides comprising a nucleotide | R67769, H11493, H11852, H13644, H22161, H28042, H39529, H42500, H43488, | |
| | sequence described by the general formula of a − b, | N32678, N50022, N51861, N54126, N54677, W16972, W32896, W35293, W38598, | |
| | where a is any integer between 1 to 4133 of SEQ ID | N89624, N90277, AA027830, AA027892, AA035739, AA055806, AA069223, | |
| | NO: 158, b is an integer of 15 to 4147, where both a | AA078890, AA078891, AA099437, AA099478, AA101431, AA112543, AA121794, | |
| | and b correspond to the positions of nucleotide | AA129629, AA136251, AA143110, AA150576, AA157125, AA158242, AA158709, | |
| | residues shown in SEQ ID NO: 158, and where b is | AA159976, AA160357, AA159491, AA160534, AA160629, AA16515O, AA165151, | |
| | greater than or equal to a + 14. | AA164643, AA166799, AA169647, AA169822, AA173082, AA187009, AA224150, | |
| | | AA224303, AA224514, AA224513, AA224488, AA226779, AA227396, AA227518, | |
| | | AA232104, AA232580, AA256938, AA255494, AA429442 | |
| 816048 | Preferably excluded from the present invention are | T54940, T59322, R35627, R46514, R48419, R48536, R48537, R48569, R48582, R48668, | |
| | one or more polynucleotides comprising a nucleotide | R48683, R49781, R49827, R53111, R53210, R66870, R67958, R69435, R69517, | |
| | sequence described by the general formula of a − b, | R70414, R71907, R71948, R72113, R72818, R73269, R75924, R75959, R79565, | |
| | where a is any integer between 1 to 1228 of SEQ ID | R79566, R80393, H25645, H26211, H29817, H29904, H39626, H39738, H39881, | |
| | NO: 159, b is an integer of 15 to 1242, where both a | H40715, H42210, H42281, H42354, H42710, H43124, R83615, R86066, R92103, | |
| | and b correspond to the positions of nucleotide | R92104, R96726, R96727, H54075, H54232, H54233, H62253, H62342, H80441, | |
| | residues shown in SEQ ID NO: 159, and where b is | H80442, H91114, H97541, H99927, N27357, N27665, N93636, W19226, W19703, | |
| | greater than or equal to a + 14. | W25418, W25514, W44404, W63554, W78078, N89960, AA027093, AA027132, | |
| | | AA045021, AA045022, AA045721, AA045720, AA046247, AA046280, AA058624, | |
| | | AA074786, AA074787, AA082394, AAO85101, AA085282, AA100996, AA127562, | |
| | | AA127729, AA127784, AA128372, AA134954, AA143611, AA148145, AA150570, | |
| | | AA161257, AA182028, AA188387, AA232423, AA464270, AA464381, AA421219, | |
| | | AA425804, AA428372 | |
| 822978 | Preferably excluded from the present invention are | R28400, R82355, R82411, H01338, H01388, N24952, N33829, AA043471, AA043472, | |
| | one or more polynucleotides comprising a nucleotide | AA125807, AA128280, AA129405, AA133871, AA129367, AA133179, AA133312, | |
| | sequence described by the general formula of a − b, | AA131385, AA428408 | |
| | where a is any integer between 1 to 2215 of SEQ ID | | |
| | NO: 160, b is an integer of 15 to 2229, where both a | | |
| | and b correspond to the positions of nucleotide | | |
| | residues shown in SEQ ID NO: 160, and where b is | | |
| | greater than or equal to a + 14. | | |
| 823616 | Preferably excluded from the present invention are | | |
| | one or more polynucleotides comprising a nucleotide | | |
| | sequence described by the general formula of a − b, | | |
| | where a is any integer between 1 to 1906 of SEQ ID | | |
| | NO: 161, b is an integer of 15 to 1920, where both a | | |
| | and b correspond to the positions of nucleotide | | |
| | residues shown in SEQ ID NO: 161, and where b is | | |
| | greater than or equal to a + 14. | | |
| 823981 | Preferably excluded from the present invention are | | |
| | one or more polynucleotides comprising a nucleotide | | |
| | sequence described by the general formula of a − b, | | |
| | where a is any integer between 1 to 2605 of SEQ ID | | |
| | NO: 162, b is an integer of 15 to 2619, where both a | | |
| | and b correspond to the positions of nucleotide | | |
| | residues shown in SEQ ID NO: 162, and where b is | | |
| | greater than or equal to a + 14. | | |
| 824364 | Preferably excluded from the present invention are | R21933, H39733, N69879, AA027031, AA100964, AA157234, AA173338 | |
| | one or more polynucleotides comprising a nucleotide | | |
| | sequence described by the general formula of a − b, | | |
| | where a is any integer between 1 to 1405 of SEQ ID | | |
| | NO: 163, b is an integer of 15 to 1419, where both a | | |
| | and b correspond to the positions of nucleotide | | |
| | residues shown in SEQ ID NO: 163, and where b is | | |
| | greater than or equal to a + 14. | | |
| 824423 | Preferably excluded from the present invention are | | |
| | one or more polynucleotides comprising a nucleotide | | |
| | sequence described by the general formula of a − b, | | |
| | where a is any integer between 1 to 3796 of SEQ ID | | |
| | NO: 164, b is an integer of 15 to 3810, where both a | | |
| | and b correspond to the positions of nucleotide | | |
| | residues shown in SEQ ID NO: 164, and where b is | | |
| | greater than or equal to a + 14. | | |
| 825279 | Preferably excluded from the present invention are | R06729, R61520, R86829, H51131, N57993, W93696, AA423827 | |
| | one or more polynucleotides comprising a nucleotide | | |
| | sequence described by the general formula of a − b, | | |
| | where a is any integer between 1 to 803 of SEQ ID | | |
| | NO: 165, b is an integer of 15 to 817, where both a and | | |
| | b correspond to the positions of nucleotide residues | | |
| | shown in SEQ ID NO: 165, and where b is greater than | | |
| | or equal to a + 14. | | |
| 825442 | Preferably excluded from the present invention are | | |
| | one or more polynucleotides comprising a nucleotide | | |
| | sequence described by the general formula of a − b, | | |
| | where a is any integer between 1 to 1564 of SEQ ID | | |
| | NO: 166, b is an integer of 15 to 1578, where both a | | |
| | and b correspond to the positions of nucleotide | | |
| | residues shown in SEQ ID NO: 166, and where b is | | |
| | greater than or equal to a + 14. | | |
| 825548 | Preferably excluded from the present invention are | | |
| | one or more polynucleotides comprising a nucleotide | | |
| | sequence described by the general formula of a − b, | | |
| | where a is any integer between 1 to 1680 of SEQ ID | | |
| | NO: 167, b is an integer of 15 to 1694, where both a | | |
| | and b correspond to the positions of nucleotide | | |
| | residues shown in SEQ ID NO: 167, and where b is | | |
| | greater than or equal to a + 14. | | |
| 825725 | Preferably excluded from the present invention are | | |
| | one or more polynucleotides comprising a nucleotide | | |
| | sequence described by the general formula of a − b, | | |
| | where a is any integer between 1 to 1622 of SEQ ID | | |
| | NO: 168, b is an integer of 15 to 1636, where both a | | |
| | and b correspond to the positions of nucleotide | | |
| | residues shown in SEQ ID NO: 168, and where b is | | |
| | greater than or equal to a + 14. | | |
| 826639 | Preferably excluded from the present invention are | | |
| | one or more polynucleotides comprising a nucleotide | | |
| | sequence described by the general formula of a − b, | | |
| | where a is any integer between 1 to 653 of SEQ ID | | |
| | NO: 169, b is an integer of 15 to 667, where both a and | | |
| | b correspond to the positions of nucleotide residues | | |
| | shown in SEQ ID NO: 169, and where b is greater than | | |
| | or equal to a + 14. | | |
| 827079 | Preferably excluded from the present invention are | | |
| | one or more polynucleotides comprising a nucleotide | | |
| | sequence described by the general formula of a − b, | | |
| | where a is any integer between 1 to 3584 of SEQ ID | | |
| | NO: 170, b is an integer of 15 to 3598, where both a | | |
| | and b correspond to the positions of nucleotide | | |
| | residues shown in SEQ ID NO: 170, and where b is | | |
| | greater than or equal to a + 14. | | |
| 827153 | Preferably excluded from the present invention are | | |
| | one or more polynucleotides comprising a nucleotide | | |
| | sequence described by the general formula of a − b, | | |
| | where a is any integer between 1 to 926 of SEQ ID | | |
| | NO: 171, b is an integer of 15 to 940, where both a and | | |
| | b correspond to the positions of nucleotide residues | | |
| | shown in SEQ ID NO: 171, and where b is greater than | | |
| | equal to a + 14. | | |
| 827351 | Preferably excluded from the present invention are | R14710, H92769, H92882, AA195498, AA242878, AA242884, AA252152, AA251967, | |
| | one or more polynucleotides comprising a nucleotide | A465181, AA465542, AA481105, AA481210, AA492206, AA732326 | |
| | sequence described by the general formula of a − b, | | |
| | where a is any integer between 1 to 1444 of SEQ ID | | |
| | NO: 172, b is an integer of 15 to 1458, where both a | | |
| | and b correspond to the positions of nucleotide | | |
| | residues shown in SEQ ID NO: 172, and where b is | | |
| | greater than or equal to a + 14. | | |
| 827503 | Preferably excluded from the present invention are | | |
| | one or more polynucleotides comprising a nucleotide | | |
| | sequence described by the general formula of a − b, | | |
| | where a is any integer between 1 to 2695 of SEQ ID | | |
| | NO: 173, b is an integer of 15 to 2709, where both a | | |
| | and b correspond to the positions of nucleotide | | |
| | residues shown in SEQ ID NO: 173, and where b is | | |
| | greater than or equal to a + 14. | | |
| 827563 | Preferably excluded from the present invention are | | |
| | one or more polynucleotides comprising a nucleotide | | |
| | sequence described by the general formula of a − b, | | |
| | where a is any integer between 1 to 999 of SEQ ID | | |
| | NO: 174, b is an integer of 15 to 1013, where both a | | |
| | and b correspond to the positions of nucleotide | | |
| | residues shown in SEQ ID NO: 174, and where b is | | |
| | greater than or equal to a + 14. | | |
| 827565 | Preferably excluded from the present invention are | | |
| | one or more polynucleotides comprising a nucleotide | | |
| | sequence described by the general formula of a − b, | | |
| | where a is any integer between 1 to 1683 of SEQ ID | | |
| | NO: 175, b is an integer of 15 to 1697, where both a | | |
| | and b correspond to the positions of nucleotide | | |
| | residues shown in SEQ ID NO: 175, and where b is | | |
| | greater than or equal to a + 14. | | |
| 827893 | Preferably excluded from the present invention are | | |
| | one or more polynucleotides comprising a nucleotide | | |
| | sequence described by the general formula of a − b, | | |
| | where a is any integer between 1 to 1395 of SEQ ID | | |
| | NO: 176, b is an integer of 15 to 1409, where both a | | |
| | and b correspond to the positions of nucleotide | | |
| | residues shown in SEQ ID NO: 176, and where b is | | |
| | greater than or equal to a + 14. | | |
| 828072 | Preferably excluded from the present invention are | R20502, R45322, R45322, H29062, H29165, N36388, N39601, AA043930, AA044003, | |
| | one or more polynucleotides comprising a nucleotide | AA115568, AA115087, AA232982, AA234020, AA251431, AA251432, AA459761, | |
| | sequence described by the general formula of a − b, | A768137, AA830696, AA918618, AA977409 | |
| | where a is any integer between 1 to 1489 of SEQ ID | | |
| | NO: 177, b is an integer of 15 to 1503, where both a | | |
| | and b correspond to the positions of nucleotide | | |
| | residues shown in SEQ ID NO: 177, and where b is | | |
| | greater than or equal to a + 14. | | |
| 828228 | Preferably excluded from the present invention are | T76992, T83862, R37649, R68086, R68125, H05325, H05379, H11520, H60866, | |
| | one or more polynucleotides comprising a nucleotide | N27826, N59149, N71661, AA004459, AA004512, AA026983, AA031653, AA045803, | |
| | sequence described by the general formula of a − b, | A045870, AA127220, AA126199, AA129772, AA133788, AA131742, AA166788, | |
| | a is any integer between 1 to 1364 of SEQ ID | AA216416, AA229513, AA469120, AA469189, AA503687, AA516488, AA522741, | |
| | NO: 178, b is an integer of 15 to 1378, where both a | A542827, AA614664, AA847108, AA876618, AA886579, AA887825, AA888263, | |
| | and b correspond to the positions of nucleotide | A888262, AA934459, N31217, D79619, N55800, AA026982, AA031743 | |
| | residues shown in SEQ ID NO: 178, and where b is | | |
| | greater than or equal to a + 14. | | |
| 828241 | Preferably excluded from the present invention are | R09047, H71262, N28995, W07805, W89157, AA007537, AA203119 | |
| | one or more polynucleotides comprising a nucleotide | | |
| | sequence described by the general formula of a − b, | | |
| | where a is any integer between 1 to 2237 of SEQ ID | | |
| | NO: 179, b is an integer of 15 to 2251, where both a | | |
| | and b correspond to the positions of nucleotide | | |
| | residues shown in SEQ ID NO: 179, and where b is | | |
| | greater than or equal to a + 14. | | |
| 828287 | Preferably excluded from the present invention are | R00158, R34699, R34806, R55812, R55897, H02931, H04234, H35896, H38841, | |
| | one or more polynucleotides comprising a nucleotide | H38877, R84345, R84762, R85507, H51401, N22910, N31298, N36027, N64463, | |
| | sequence described by the general formula of a − b, | N70710, N80820, N94519, N99846, W15234, W15579, W15620, W23968, W24669, | |
| | where a is any integer between 1 to 986 of SEQ ID | W30920, W31655, W37399, W37400, W39182, W45512, W44342, W45653, W44569, | |
| | NO: 180, b is an integer of 15 to 1000, where both a | W44608, W47630, W47631, W52183, W52421, W57603, W58189, W58466, W60614, | |
| | and b correspond to the positions of nucleotide | W73715, W78044, W90451, W90258, W92042, W91902, AA012954, AA013060, | |
| | residues shown in SEQ ID NO: 180, and where b is | AA013459, AA013460, AA018132, AA018050, AA021226, AA021359, AA021556, | |
| | greater than or equal to a + 14. | AA021640, AA033802, AA040580, AA040552, AA047883, AA054092, AA055181, | |
| | | AA055893, AA082252, AA082502, AA099128, AA099165, AA100988, AA131285, | |
| | | AA136296, AA136178, AA151469, AA151470, AA156144, AA158033, AA158325, | |
| | | AA164422, AA164402, AA167105, AA182609, AA182541, AA187289, AA187406, | |
| | | AA523678, AA582094, AA570257, AA573999, AA574305, AA579097, AA661683, | |
| | | AA662869, AA664665, AA736798, AA770689, AA865267, AA902336, AA923648, | |
| | | AA933570, AA939196, AA988468, A1000226, A1089764, D79059, N84733, W73650, | |
| | | N86290, N88454, C04677, C06015, AA033803, R29541, AA089664, AA089996, | |
| | | C17096, C17255, C19033, AA093458 | |
| 828364 | Preferably excluded from the present invention are | R55711, R55921, R68105, R68149, R72479, N70480, W72759 | |
| | one or more polynucleotides comprising a nucleotide | | |
| | sequence described by the general formula of a − b, | | |
| | where a is any integer between 1 to 1415 of SEQ ID | | |
| | NO: 181, b is an integer of 15 to 1429, where both a | | |
| | and b correspond to the positions of nucleotide | | |
| | residues shown in SEQ ID NO: 181, and where b is | | |
| | greater than or equal to a + 14. | | |
| 828371 | Preferably excluded from the present invention are | T62048, T62112, T91683, T92364, T92416, T93284, N49690, N49793, N64329, N80813, | |
| | one or more polynucleotides comprising a nucleotide | W15549, W15404, W31643, W53039, W92220, W92342, AA055521, AA055520, | |
| | sequence described by the general formula of a − b, | AA149883, AA150063, AA148836, AA150436 | |
| | where a is any integer between 1 to 2711 of SEQ ID | | |
| | NO: 182, b is an integer of 15 to 2725, where both a | | |
| | and b correspond to the positions of nucleotide | | |
| | residues shown in SEQ ID NO: 182, and where b is | | |
| | greater than or equal to a + 14. | | |
| 828403 | Preferably excluded from the present invention are | AA485171, AA515218, AA603721, AA612760, AA838541, AA970526, C18512 | |
| | one or more polynucleotides comprising a nucleotide | | |
| | sequence described by the general formula of a − b, | | |
| | where a is any integer between 1 to 1737 of SEQ ID | | |
| | NO: 183, b is an integer of 15 to 1751, where both a | | |
| | and b correspond to the positions of nucleotide | | |
| | residues shown in SEQ ID NO: 183, and where b is | | |
| | greater than or equal to a + 14. | | |
| 828501 | Preferably excluded from the present invention are | H19145, N75547, AA044653, AA128979, AA159576, AA423963, AA523306, H62675, | |
| | one or more polynucleotides comprising a nucleotide | H97872, AA610503, AA010941, AA011327, AA043344 | |
| | sequence described by the general formula of a − b, | | |
| | where a is any integer between 1 to 2186 of SEQ ID | | |
| | NO: 184, b is an integer of 15 to 2200, where both a | | |
| | and b correspond to the positions of nucleotide | | |
| | residues shown in SEQ ID NO: 184, and where b is | | |
| | greater than or equal to a + 14. | | |
| 828520 | Preferably excluded from the present invention are | H70392, N30525, N30537, AA010769, AA463668, AA927343, AA091744 | |
| | one or more polynucleotides comprising a nucleotide | | |
| | sequence described by the general formula of a − b, | | |
| | where a is any integer between 1 to 1973 of SEQ ID | | |
| | NO: 185, b is an integer of 15 to 1987, where both a | | |
| | and b correspond to the positions of nucleotide | | |
| | residues shown in SEQ ID NO: 185, and where b is | | |
| | greater than or equal to a + 14. | | |
| 828527 | Preferably excluded from the present invention are | T39306, T40514, R08857, R08964, R00734, R00735, R13824, R20172, R37684, R44959, | |
| | one or more polynucleotides comprising a nucleotide | R44959, H05503, H17017, H17018, H54295, H54372, H54503, H67654, H67974, | |
| | sequence described by the general formula of a − b, | H87993, N33311, N37017, N44843, N55182, N75469, N75534, N77241, N93004, | |
| | where a is any integer between 1 to 1723 of SEQ ID | W05278, W05327, W45465, W88760, W88865, AA010623, AA010624, AA234956, | |
| | NO: 186, b is an integer of 15 to 1737, where both a | AA235130, AA424457, AA282705, AA283023, AA283109, AA481529, AA481595, | |
| | and b correspond to the positions of nucleotide | AA490727, AA491218, AA554176, AA614573, AA665370, AA687964, AA736921, | |
| | residues shown in SEQ ID NO: 186, and where b is | AA765107, AA767430, AA809487, AA865595, N88052 | |
| | greater than or equal to a + 14. | | |
| 828538 | Preferably excluded from the present invention are | | |
| | one or more polynucleotides comprising a nucleotide | | |
| | sequence described by the general formula of a − b, | | |
| | where a is any integer between 1 to 1118 of SEQ ID | | |
| | NO: 187, b is an integer of 15 to 1132, where both a | | |
| | and b correspond to the positions of nucleotide | | |
| | residues shown in SEQ ID NO: 187, and where b is | | |
| | greater than or equal to a + 14. | | |
| 828541 | Preferably excluded from the present invention are | | |
| | one or more polynucleotides comprising a nucleotide | | |
| | sequence described by the general formula of a − b, | | |
| | where a is any integer between 1 to 1253 of SEQ ID | | |
| | NO: 188, b is an integer of 15 to 1267, where both a | | |
| | and b correspond to the positions of nucleotide | | |
| | residues shown in SEQ ID NO: 188, and where b is | | |
| | greater than or equal to a + 14. | | |
| 828549 | Preferably excluded from the present invention are | | |
| | one or more polynucleotides comprising a nucleotide | | |
| | sequence described by the general formula of a − b, | | |
| | where a is any integer between 1 to 3773 of SEQ ID | | |
| | NO: 189, b is an integer of 15 to 3787, where both a | | |
| | and b correspond to the positions of nucleotide | | |
| | residues shown in SEQ ID NO: 189, and where b is | | |
| | greater than or equal to a + 14. | | |
| 828562 | Preferably excluded from the present invention are | | |
| | one or more polynucleotides comprising a nucleotide | | |
| | sequence described by the general formula of a − b, | | |
| | where a is any integer between 1 to 540 of SEQ ID | | |
| | NO: 190, b is an integer of 15 to 554, where both a and | | |
| | b correspond to the positions of nucleotide residues | | |
| | shown in SEQ ID NO: 190, and where b is greater than | | |
| | or equal to a + 14. | | |
| 828576 | Preferably excluded from the present invention are | | |
| | one or more polynucleotides comprising a nucleotide | | |
| | sequence described by the general formula of a − b, | | |
| | where a is any integer between 1 to 860 of SEQ ID | | |
| | NO: 191, b is an integer of 15 to 874, where both a and | | |
| | b correspond to the positions of nucleotide residues | | |
| | shown in SEQ ID NO: 191, and where b is greater than | | |
| | or equal to a + 14. | | |
| 828602 | Preferably excluded from the present invention are | | |
| | one or more polynucleotides comprising a nucleotide | | |
| | sequence described by the general formula of a − b, | | |
| | where a is any integer between 1 to 2089 of SEQ ID | | |
| | NO: 192, b is an integer of 15 to 2103, where both a | | |
| | and b correspond to the positions of nucleotide | | |
| | residues shown in SEQ ID NO: 192, and where b is | | |
| | greater than or equal to a + 14. | | |
| 828628 | Preferably excluded from the present invention are | | |
| | one or more polynucleotides comprising a nucleotide | | |
| | sequence described by the general formula of a − b, | | |
| | where a is any integer between 1 to 1303 of SEQ ID | | |
| | NO: 193, b is an integer of 15 to 1317, where both a | | |
| | and b correspond to the positions of nucleotide | | |
| | residues shown in SEQ ID NO: 193, and where b is | | |
| | greater than or equal to a + 14. | | |
| 828667 | Preferably excluded from the present invention are | | |
| | one or more polynucleotides comprising a nucleotide | | |
| | sequence described by the general formula of a − b, | | |
| | where a is any integer between 1 to 1238 of SEQ ID | | |
| | NO: 194, b is an integer of 15 to 1252, where both a | | |
| | and b correspond to the positions of nucleotide | | |
| | residues shown in SEQ ID NO: 194, and where b is | | |
| | greater than or equal to a + 14. | | |
| 828684 | Preferably excluded from the present invention are | R11676, R12284, N68621, N71575, N99448, W02008, W58632, W74361, W76341, | |
| | one or more polynucleotides comprising a nucleotide | W78934, W85701, AA070898, AA070787, AA102636, AA102661, AA102678, | |
| | sequence described by the general formula of a − b, | AA190864, AA190957, AA197279, AA251577, AA464994, AA421724, AA470741, | |
| | where a is any integer between 1 to 1674 of SEQ ID | AA505341, AA506137, AA583780, AA579967, AA714136, AA743352, AA747903, | |
| | NO: 195, b is an integer of 15 to 1688, where both a | AA814422, AA826755, AA836633, AA837944, AA936844, AI004160, C00265, | |
| | and b correspond to the positions of nucleotide | A641021 | |
| | residues shown in SEQ ID NO: 195, and where b 15 | | |
| | greater than or equal to a + 14. | | |
| 828727 | Preferably excluded from the present invention are | R35925, R35954, R49443, R49468, R49443, R49468, N74960, AA083678, AA086366, | |
| | one or more polynucleotides comprising a nucleotide | AA100585, AA111863, AA156573, AA159175, AA192611, AA195925, AA195976, | |
| | sequence described by the general formula of a − b, | AA418567, AA418582 | |
| | where a is any integer between 1 to 742 of SEQ ID | | |
| | NO: 196, b is an integer of 15 to 756, where both a and | | |
| | b correspond to the positions of nucleotide residues | | |
| | shown in SEQ ID NO: 196, and where b is greater than | | |
| | or equal to a + 14. | | |
| 828734 | Preferably excluded from the present invention are | | |
| | one or more polynucleotides comprising a nucleotide | | |
| | sequence described by the general formula of a − b, | | |
| | where a is any integer between 1 to 1457 of SEQ ID | | |
| | NO: 197, b is an integer of 15 to 1471, where both a | | |
| | and b correspond to the positions of nucleotide | | |
| | residues shown in SEQ ID NO: 197, and where b is | | |
| | greater than or equal to a + 14. | | |
| 828750 | Preferably excluded from the present invention are | | |
| | one or more polynucleotides comprising a nucleotide | | |
| | sequence described by the general formula of a − b, | | |
| | where a is any integer between 1 to 678 of SEQ ID | | |
| | NO: 198, b is an integer of 15 to 692, where both a and | | |
| | b correspond to the positions of nucleotide residues | | |
| | shown in SEQ ID NO: 198, and where b is greater than | | |
| | or equal to a + 14. | | |
| 828842 | Preferably excluded from the present invention are | R31695, R31737, R86919, R86763, H66952, N30849, N41376, N95538, W03782, | |
| | one or more polynucleotides comprising a nucleotide | W24227, N90171, AAO2000l, AA046039, AA046149, AA099753, AA489705, | |
| | sequence described by the general formula of a − b, | AA552582, AA580818, AA584291, AA730113, AA910268 | |
| | where a is any integer between 1 to 1559 of SEQ ID | | |
| | NO: 199, b is an integer of 15 to 1573, where both a | | |
| | and b correspond to the positions of nucleotide | | |
| | residues shown in SEQ ID NO: 199, and where b is | | |
| | greater than or equal to a + 14. | | |
| 828843 | Preferably excluded from the present invention are | T57326, T57387, T94838, T94837, T94879, T94925, T74456, R11995, R15234, R19543, | |
| | one or more polynucleotides comprising a nucleotide | R21728, R36670, R39752, R39834, R40808, R40808, R43895, R70936, R70988, | |
| | sequence described by the general formula of a − b, | R74057, R74152, R79967, R80062, H02983, H04277, H08966, H09537, H25298, | |
| | where a is any integer between 1 to 2728 of SEQ ID | H25343, H25449, H25495, H29439, H29438, H29887, H29987, R86318, H65676, | |
| | NO: 200, b is an integer of 15 to 2742, where both a | H87966, H88350, H97859, N20316, N26629, N27590, N39724, N52972, W39188, | |
| | and b correspond to the positions of nucleotide | W45099, W45149, N90248, AA004834, AA033776, AA039900, AA039901, AA041524, | |
| | residues shown in SEQ ID NO: 200, and where b is | AA044928, AA082729, AA085742, AA112974, AA128343, AA133157, AA171997, | |
| | greater than or equal to a + 14. | AA418609, AA418664, AA421626, AA430065, AA230107, AA230108, AA513630, | |
| | | AA521134, AA622056, AA635868, AA639882, AA714929, AA715480, AA715556, | |
| | | AA729814, AA731061, AA811597, AA830222, AA873240, AA886078, AA886270, | |
| | | AA907208, AA932201, AA977447, AA989000, D81476, N56281, C21262, AA089709 | |
| 828851 | Preferably excluded from the present invention are | | |
| | one or more polynucleotides comprising a nucleotide | | |
| | sequence described by the general formula of a − b, | | |
| | where a is any integer between 1 to 1403 of SEQ ID | | |
| | NO: 201, b is an integer of 15 to 1417, where both a | | |
| | and b correspond to the positions of nucleotide | | |
| | residues shown in SEQ ID NO: 201, and where b is | | |
| | greater than or equal to a + 14. | | |
| 828856 | Preferably excluded from the present invention are | | |
| | one or more polynucleotides comprising a nucleotide | | |
| | sequence described by the general formula of a − b, | | |
| | where a is any integer between 1 to 1498 of SEQ ID | | |
| | NO: 202, b is an integer of 15 to 1512, where both a | | |
| | and b correspond to the positions of nucleotide | | |
| | residues shown in SEQ ID NO: 202, and where b is | | |
| | greater than or equal to a + 14. | | |
| 828862 | Preferably excluded from the present invention are | A021223 | |
| | one or more polynucleotides comprising a nucleotide | | |
| | sequence described by the general formula of a − b, | | |
| | where a is any integer between 1 to 405 of SEQ ID | | |
| | NO: 203, b is an integer of 15 to 419, where both a and | | |
| | b correspond to the positions of nucleotide residues | | |
| | shown in SEQ ID NO: 203, and where b is greater than | | |
| | or equal to a + 14. | | |
| 828870 | Preferably excluded from the present invention are | | |
| | one or more polynucleotides comprising a nucleotide | | |
| | sequence described by the general formula of a − b, | | |
| | where a is any integer between 1 to 2819 of SEQ ID | | |
| | NO: 204, b is an integer of 15 to 2833, where both a | | |
| | and b correspond to the positions of nucleotide | | |
| | residues shown in SEQ ID NO: 204, and where b is | | |
| | greater than or equal to a + 14. | | |
| 828873 | Preferably excluded from the present invention are | | |
| | one or more polynucleotides comprising a nucleotide | | |
| | sequence described by the general formula of a − b, | | |
| | where a is any integer between 1 to 5816 of SEQ ID | | |
| | NO: 205, b is an integer of 15 to 5830, where both a | | |
| | and b correspond to the positions of nucleotide | | |
| | residues shown in SEQ ID NO: 205, and where b is | | |
| | greater than or equal to a + 14. | | |
| 828892 | Preferably excluded from the present invention are | R54649, W46198 | |
| | one or more polynucleotides comprising a nucleotide | | |
| | sequence described by the general formula of a − b, | | |
| | where a is any integer between 1 to 741 of SEQ ID | | |
| | NO: 206, b is an integer of 15 to 755, where both a and | | |
| | b correspond to the positions of nucleotide residues | | |
| | shown in SEQ ID NO: 206, and where b is greater than | | |
| | or equal to a + 14. | | |
| 828893 | Preferably excluded from the present invention are | | |
| | one or more polynucleotides comprising a nucleotide | | |
| | sequence described by the general formula of a − b, | | |
| | where a is any integer between 1 to 1982 of SEQ ID | | |
| | NO: 207, b is an integer of 15 to 1996, where both a | | |
| | and b correspond to the positions of nucleotide | | |
| | residues shown in SEQ ID NO: 207, and where b is | | |
| | greater than or equal to a + 14. | | |
| 828897 | Preferably excluded from the present invention are | | |
| | one or more polynucleotides comprising a nucleotide | | |
| | sequence described by the general formula of a − b, | | |
| | where a is any integer between 1 to 1654 of SEQ ID | | |
| | NO: 208, b is an integer of 15 to 1668, where both a | | |
| | and b correspond to the positions of nucleotide | | |
| | residues shown in SEQ ID NO: 208, and where b is | | |
| | greater than or equal to a + 14. | | |
| 828910 | Preferably excluded from the present invention are | T91595, T65436, T65518, T70584, T70847, T75377, R09159, R09261, R09950, T96365, | |
| | one or more polynucleotides comprising a nucleotide | T96446, R12590, R13068, R18120, R21193, R22430, R22480, R22810, R25025, R26742, | |
| | sequence described by the general formula of a − b, | R26976, R32026, R32079, R33017, R33904, R36588, R39200, R40499, R45972, | |
| | where a is any integer between 1 to 2236 of SEQ ID | R40499, R45972, R56330, R64494, R65591, R67446, R70974, R74477, R74579, | |
| | NO: 209, b is an integer of 15 to 2250, where both a | R77932, R78301, R78497, R78547, R80142, R80143, H00643, H00729, H03024, | |
| | and b correspond to the positions of nucleotide | H04306, H06614, H07124, H09643, H09677, H28706, H28835, H42802, H47310, | |
| | residues shown in SEQ ID NO: 209, and where b is | R92010, H65658, H65657, H67068, H68151, H71685, H72248, H72786, H72785, | |
| | greater than or equal to a + 14. | H73342, H75583, H75514, H77433, H98557, N20087, N22979, N23822, N28617, | |
| | | N29593, N32509, N33262, N40705, N42724, N44752, N45195, N57760, N58105, | |
| | | N59101, N59726, N64423, N66868, N71993, N73995, N99375, W01801, W02025, | |
| | | W19280, W19667, W19930, W25451, W25645, W31475, W31938, W32153, W32005, | |
| | | W37711, W37710, W46758, W46905, W49818, W56089, W57771, W57844, W61375, | |
| | | W61376, W60415, W60416, W61142, W61190, W67942, W67941, W74649, W84332, | |
| | | W84393, W86146, W94323, AA016041, AA015933, AA022593, AA022594, AA030003, | |
| | | AA043309, AA069392, AA069393, AA069775, AA069812, AA102392, AA112674, | |
| | | AA112673, AA135337, AA135336, AA143448, AA152405, AA152459, AA149804, | |
| | | AA149829, AA149849, AA149856, AA156559, AA157731, AA159045, AA160734, | |
| | | AA173662, AA173661, AA235812, AA242974, AA243081, AA242998, AA252146, | |
| | | AA460003, AA460542, AA428205, AA429142, AA285041, AA283758, AA283993, | |
| | | AA480305, AA506566, AA524852, AA631324, AA575859, AA658502, AA766717, | |
| | | AA808234, AA837876, AA866075, AA877425, AA879058, AA886608, AA902179, | |
| | | AA904000, AA928667, AA937136, AA962263, AA995987, AI024986, W25995, | |
| | | W26229, W27231, W26246, W28106, W28807, W48809, C01974, AA640952, C14885, | |
| | | C15137 | |
| 828927 | Preferably excluded from the present invention are | | |
| | one or more polynucleotides comprising a nucleotide | | |
| | sequence described by the general formula of a − b, | | |
| | where a is any integer between 1 to 824 of SEQ ID | | |
| | NO: 210, b is an integer of 15 to 838, where both a and | | |
| | b correspond to the positions of nucleotide residues | | |
| | shown in SEQ ID NO: 210, and where b is greater than | | |
| | or equal to a + 14. | | |
| 828932 | Preferably excluded from the present invention are | T50679, T51209, T78077, R42605, R48768, R42605, R91277, H61157, W38635, | |
| | one or more polynucleotides comprising a nucleotide | W44738, W46899, W80700, AA017684, AA017707, AA018069, AA019662, AA040254, | |
| | sequence described by the general formula of a − b, | AA053989, AA054041, AA070137, AA070138, AA074661, AA086354, AA158859, | |
| | where a is any integer between 1 to 1199 of SEQ ID | AA223111, AA224210, AA224315, AA232155, AA471047, AA588037, AA720832, | |
| | NO: 211, b is an integer of 15 to 1213, where both a | AA872503 | |
| | and b correspond to the positions of nucleotide | | |
| | residues shown in SEQ ID NO: 211, and where b is | | |
| | greater than or equal to a + 14. | | |
| 828933 | Preferably excluded from the present invention are | | |
| | one or more polynucleotides comprising a nucleotide | | |
| | sequence described by the general formula of a − b, | | |
| | where a is any integer between 1 to 955 of SEQ ID | | |
| | NO: 212, b is an integer of 15 to 969, where both a and | | |
| | b correspond to the positions of nucleotide residues | | |
| | shown in SEQ ID NO: 212, and where b is greater than | | |
| | or equal to a + 14. | | |
| 828941 | Preferably excluded from the present invention are | | |
| | one or more polynucleotides comprising a nucleotide | | |
| | sequence described by the general formula of a − b, | | |
| | where a is any integer between 1 to 1680 of SEQ ID | | |
| | NO: 213, b is an integer of 15 to 1694, where both a | | |
| | and b correspond to the positions of nucleotide | | |
| | residues shown in SEQ ID NO: 213, and where b is | | |
| | greater than or equal to a + 14. | | |
| 828957 | Preferably excluded from the present invention are | R09987, R16645, R16734, R81727, H58067, H58066, H59815, H59816, H64860, | |
| | one or more polynucleotides comprising a nucleotide | H65458, N70923, W81647, W81187, AA052891, AA053046, AA251319, AA251723, | |
| | sequence described by the general formula of a − b, | AA262259, AA262870, AA463359, AA463865, AA417918, AA418169, AA480203, | |
| | where a is any integer between 1 to 1196 of SEQ ID | AA521273, AA836429, AA858135, AA888105, AA917914, AA937591, AA947712, | |
| | NO: 214, b is an integer of 15 to 1210, where both a | AA961752, AA973797, AI085881 | |
| | and b correspond to the positions of nucleotide | | |
| | residues shown in SEQ ID NO: 214, and where b is | | |
| | greater than or equal to a + 14. | | |
| 828963 | Preferably excluded from the present invention are | | |
| | one or more polynucleotides comprising a nucleotide | | |
| | sequence described by the general formula of a − b, | | |
| | where a is any integer between 1 to 1762 of SEQ ID | | |
| | NO: 215, b is an integer of 15 to 1776, where both a | | |
| | and b correspond to the positions of nucleotide | | |
| | residues shown in SEQ ID NO: 215, and where b is | | |
| | greater than or equal to a + 14. | | |
| 828964 | Preferably excluded from the present invention are | | |
| | one or more polynucleotides comprising a nucleotide | | |
| | sequence described by the general formula of a − b, | | |
| | where a is any integer between 1 to 1404 of SEQ ID | | |
| | NO: 216, b is an integer of 15 to 1418, where both a | | |
| | and b correspond to the positions of nucleotide | | |
| | residues shown in SEQ ID NO: 216, and where b is | | |
| | greater than or equal to a + 14. | | |
| 828966 | Preferably excluded from the present invention are | T57322, T57383, R07432, R07433, R24183, R37889, R64196, R64212, H10798, | |
| | one or more polynucleotides comprising a nucleotide | H16281, H96182, N24864, N31801, N31897, N51466, N53607, N71323, N71374, | |
| | sequence described by the general formula of a − b, | N71696, N78973, N91801, N99595, N99806, W17338, W38617, W44695, W52815, | |
| | where a is any integer between 1 to 2186 of SEQ ID | W93325, W95029, AA027074, AA031625, AA031706, AA034522, AA101476, | |
| | NO: 217, b is an integer of 15 to 2200, where both a | A101477, AA156927, AA157179, AA173234, AA196758, AA506558, AA541561, | |
| | and b correspond to the positions of nucleotide | AA552220, AA573198, AA687807, AA732065, AA769029, AA804914, AA858375, | |
| | residues shown in SEQ ID NO: 217, and where b is | AA931935, AA995830, A1075078, A1075079, AA641307 | |
| | greater than or equal to a + 14. | | |
| 828967 | Preferably excluded from the present invention are | T86194, T99270, R00981, R21065, R28076, R28291, R46245, R46245, R61751, R61752, | |
| | one or more polynucleotides comprising a nucleotide | H20415, H41325, H46347, H46354, W01107, W96450, W96548, AA082920, AA192528, | |
| | sequence described by the general formula of a − b, | AA494252, AA507548, AA604189, AA604361, AA614008, AA622126, AA573865, | |
| | where a is any integer between 1 to 1839 of SEQ ID | AA578191, AA568157, AA780392, AA812241, AA830010, AA836096, AA876742, | |
| | NO: 218, b is an integer of 15 to 1853, where both a | C21216 | |
| | and b correspond to the positions of nucleotide | | |
| | residues shown in SEQ ID NO: 218, and where b is | | |
| | greater than or equal to a + 14. | | |
| 828977 | Preferably excluded from the present invention are | T54853, T55018, T61617, T61701, T71718, T71787, R43855, R43855, H79047, | |
| | one or more polynucleotides comprising a nucleotide | W23509, W78022, AA028959, AA028960, AA035641, AA035749, AA040562, | |
| | sequence described by the general formula of a − b, | AA042827, AA044641, AA150059, AA459301, AA459532, AA419054, AA532924, | |
| | where a is any integer between 1 to 1079 of SEQ ID | AA603462, AA573839, AA863332, AA877269, AI016670, AI083871, AI085531 | |
| | NO: 219, b is an integer of 15 to 1093, where both a | | |
| | and b correspond to the positions of nucleotide | | |
| | residues shown in SEQ ID NO: 219, and where b is | | |
| | greater than or equal to a + 14. | | |
| 828978 | Preferably excluded from the present invention are | | |
| | one or more polynucleotides comprising a nucleotide | | |
| | sequence described by the general formula of a − b, | | |
| | where a is any integer between 1 to 2141 of SEQ ID | | |
| | NO: 220, b is an integer of 15 to 2155, where both a | | |
| | and b correspond to the positions of nucleotide | | |
| | residues shown in SEQ ID NO: 220, and where b is | | |
| | greater than or equal to a + 14. | | |
| 828979 | Preferably excluded from the present invention are | | |
| | one or more polynucleotides comprising a nucleotide | | |
| | sequence described by the general formula of a − b, | | |
| | where a is any integer between 1 to 1250 of SEQ ID | | |
| | NO: 221, b is an integer of 15 to 1264, where both a | | |
| | and b correspond to the positions of nucleotide | | |
| | residues shown in SEQ ID NO: 221, and where b is | | |
| | greater than or equal to a + 14. | | |
| 829001 | Preferably excluded from the present invention are | | |
| | one or more polynucleotides comprising a nucleotide | | |
| | sequence described by the general formula of a − -b, | | |
| | where a is any integer between 1 to 2071 of SEQ ID | | |
| | NO: 222, b is an integer of 15 to 2085, where both a | | |
| | and b correspond to the positions of nucleotide | | |
| | residues shown in SEQ ID NO: 222, and where b is | | |
| | greater than or equal to a + 14. | | |
| 829003 | Preferably excluded from the present invention are | T56900, T56901, T57894, T57976, T58709, T83854, T83994, T83995, T85283, T85493, | |
| | one or more polynucleotides comprising a nucleotide | T85938, T98545, T98546, R23866, R51491, R51492, R70815, H06524, H06579, | |
| | sequence described by the general formula of a − b, | H21400, H22212, H26306, H26465, H40800, H42803, H44004, H45104, H45577, | |
| | where a is any integer between 1 to 2907 of SEQ ID | R84544, R85933, R95902, R98186, R98187, R99129, H51499, H62734, H62818, | |
| | NO: 223, b is an integer of 15 to 2921, where both a | H67266, H67280, H67971, H72027, H72028, H86532, H86617, H97834, N22060, | |
| | and b correspond to the positions of nucleotide | N22322, N22927, N23444, N23843, N27358, N27627, N31797, N53099, N55505, | |
| | residues shown in SEQ ID NO: 223, and where b is | N55527, N62760, N76278, N76994, N81072, N99969, W07363, W15385, W30908, | |
| | greater than or equal to a + 14. | W32209, W32266, W37612, W39341, W45721, W44369, W60688, W60728, W74331, | |
| | | W79764, W79508, AA010902, AA011007, AA013382, AA013383, AA017180, | |
| | | AA018376, AA021435, AA128552, AA128295, AA161229, AA160487, AA236095, | |
| | | AA259037, AA458538, AA428449, AA491943, AA492101, AA501898, AA505736, | |
| | | AA551906, AA552335, AA554636, AA564579, AA588897, AA593936, AA595710, | |
| | | AA610733, AA612690, AA569349, AA570259, AA570263, AA573856, AA579746, | |
| | | AA658849, AA721609, AA743280, AA743326, AA808972, AA831035, AA836900, | |
| | | AA887420, AA887859, AA970292, AA994943, AA994947, AI014465, F19724, N36447, | |
| | | D78889, N75198, W37467, W79607, C03008, C04753 | |
| 829016 | Preferably excluded from the present invention are | | |
| | one or more polynucleotides comprising a nucleotide | | |
| | sequence described by the general formula of a − b, | | |
| | where a is any integer between 1 to 4381 of SEQ ID | | |
| | NO: 224, b is an integer of 15 to 4395, where both a | | |
| | and b correspond to the positions of nucleotide | | |
| | residues shown in SEQ ID NO: 224, and where b is | | |
| | greater than or equal to a + 14. | | |
| 829027 | Preferably excluded from the present invention are | | |
| | one or more polynucleotides comprising a nucleotide | | |
| | sequence described by the general formula of a − b, | | |
| | where a is any integer between 1 to 3021 of SEQ ID | | |
| | NO: 225, b is an integer of 15 to 3035, where both a | | |
| | and b correspond to the positions of nucleotide | | |
| | residues shown in SEQ ID NO: 225, and where b is | | |
| | greater than or equal to a + 14. | | |
| 829028 | Preferably excluded from the present invention are | | |
| | one or more polynucleotides comprising a nucleotide | | |
| | sequence described by the general formula of a − b, | | |
| | where a is any integer between 1 to 1497 of SEQ ID | | |
| | NO: 226, b is an integer of 15 to 1511, where both a | | |
| | and b correspond to the positions of nucleotide | | |
| | residues shown in SEQ ID NO: 226, and where b is | | |
| | greater than or equal to a + 14. | | |
| 829031 | Preferably excluded from the present invention are | T52373, T52446, T65540, T91789, R10959, T84998, R06717, R28502, R48288, R48390, | |
| | one or more polynucleotides comprising a nucleotide | R48442, R54616, R54879, R55311, R55316, R55413, R55418, R72602, R72669, | |
| | sequence described by the general formula of a − b, | R72946, H15595, H27333, H41543, H37781, R84976, R85050, R88513, R88514, | |
| | where a is any integer between 1 to 2225 of SEQ ID | H49052, H49116, H96219, H96754, H97979, N23664, N25056, N26150, N32997, | |
| | NO: 227, b is an integer of 15 to 2239, where both a | N51857, N54122, W65281, W65277, W72409, W76488, W92510, N91031, AA045475, | |
| | and b correspond to the positions of nucleotide | AA056943, AA057662, AA057806, AA126670, AA127032, AA136891, AA137001, | |
| | residues shown in SEQ ID NO: 227, and where b is | AA158595, AA158989, AA279342, AA604130, AA604929, AA631863, C01812 | |
| | greater than or equal to a + 14. | | |
| 829034 | Preferably excluded from the present invention are | | |
| | one or more polynucleotides comprising a nucleotide | | |
| | sequence described by the general formula of a − b, | | |
| | where a is any integer between 1 to 2332 of SEQ ID | | |
| | NO: 228, b is an integer of 15 to 2346, where both a | | |
| | and b correspond to the positions of nucleotide | | |
| | residues shown in SEQ ID NO: 228, and where b is | | |
| | greater than or equal to a + 14. | | |
| 829036 | Preferably excluded from the present invention are | W19899, W56172, N91246, AA053015, AA258943, AA508101, AA557537, AA744258, | |
| | one or more polynucleotides comprising a nucleotide | C06034, AA053503 | |
| | sequence described by the general formula of a − b, | | |
| | where a is any integer between 1 to 2232 of SEQ ID | | |
| | NO: 229, b is an integer of 15 to 2246, where both a | | |
| | and b correspond to the positions of nucleotide | | |
| | residues shown in SEQ ID NO: 229, and where b is | | |
| | greater than or equal to a + 14. | | |
| 829049 | Preferably excluded from the present invention are | | |
| | one or more polynucleotides comprising a nucleotide | | |
| | sequence described by the general formula of a − b, | | |
| | where a is any integer between 1 to 1988 of SEQ ID | | |
| | NO: 230, b is an integer of 15 to 2002, where both a | | |
| | and b correspond to the positions of nucleotide | | |
| | residues shown in SEQ ID NO: 230, and where b is | | |
| | greater than or equal to a + 14. | | |
| 829073 | Preferably excluded from the present invention are | N71827, W07562, W79070, W94296, AA026190, AA215725, AA279902, AA832099 | |
| | one or more polynucleotides comprising a nucleotide | | |
| | sequence described by the general formula of a − b, | | |
| | where a is any integer between 1 to 980 of SEQ ID | | |
| | NO: 231, b is an integer of 15 to 994, where both a and | | |
| | b correspond to the positions of nucleotide residues | | |
| | shown in SEQ ID NO: 231, and where b is greater than | | |
| | or equal to a + 14. | | |
| 829075 | Preferably excluded from the present invention are | | |
| | one or more polynucleotides comprising a nucleotide | | |
| | sequence described by the general formula of a − b, | | |
| | where a is any integer between 1 to 472 of SEQ ID | | |
| | NO: 232, b is an integer of 15 to 486, where both a and | | |
| | b correspond to the positions of nucleotide residues | | |
| | shown in SEQ ID NO: 232, and where b is greater than | | |
| | or equal to a + 14. | | |
| 829076 | Preferably excluded from the present invention are | | |
| | one or more polynucleotides comprising a nucleotide | | |
| | sequence described by the general formula of a − b, | | |
| | where a is any integer between 1 to 2067 of SEQ ID | | |
| | NO: 233, b is an integer of 15 to 2081, where both a | | |
| | and b correspond to the positions of nucleotide | | |
| | residues shown in SEQ ID NO: 233, and where b is | | |
| | greater than or equal to a + 14. | | |
| 829080 | Preferably excluded from the present invention are | | |
| | one or more polynucleotides comprising a nucleotide | | |
| | sequence described by the general formula of a − b, | | |
| | where a is any integer between 1 to 502 of SEQ ID | | |
| | NO: 234, b is an integer of 15 to 516, where both a and | | |
| | b correspond to the positions of nucleotide residues | | |
| | shown in SEQ ID NO: 234, and where b is greater than | | |
| | or equal to a + 14. | | |
| 829087 | Preferably excluded from the present invention are | | |
| | one or more polynucleotides comprising a nucleotide | | |
| | sequence described by the general formula of a − b, | | |
| | where a is any integer between 1 to 1115 of SEQ ID | | |
| | NO: 235, b is an integer of 15 to 1129, where both a | | |
| | and b correspond to the positions of nucleotide | | |
| | residues shown in SEQ ID NO: 235, and where b is | | |
| | greater than or equal to a + 14. | | |
| 829092 | Preferably excluded from the present invention are | | |
| | one or more polynucleotides comprising a nucleotide | | |
| | sequence described by the general formula of a − b, | | |
| | where a is any integer between 1 to 1031 of SEQ ID | | |
| | NO: 236, b is an integer of 15 to 1045, where both a | | |
| | and b correspond to the positions of nucleotide | | |
| | residues shown in SEQ ID NO: 236, and where b is | | |
| | greater than or equal to a + 14. | | |
| 829095 | Preferably excluded from the present invention are | T98739, T98740, R53404, R72484, H09731, H16600, H21795, H25680, N79773, | |
| | one or more polynucleotides comprising a nucleotide | N93472, AA812105, AA826523, AA954170, AI084914 | |
| | sequence described by the general formula of a − b, | | |
| | where a is any integer between 1 to 676 of SEQ ID | | |
| | NO: 237, b is an integer of 15 to 690, where both a and | | |
| | b correspond to the positions of nucleotide residues | | |
| | shown in SEQ ID NO: 237, and where b is greater than | | |
| | or equal to a + 14. | | |
| 829096 | Preferably excluded from the present invention are | T40001, T40939, R53257, R62981, R62980, R63036, H15127, H15187, H24078, | |
| | one or more polynucleotides comprising a nucleotide | H24188, H81472, H88927, H88927, H99390, N32032, N47835, N66666, N98950, | |
| | sequence described by the general formula of a − b, | AA022842, AA022965, AA024917, AA024918, AA035721, AA062907, AA102646, | |
| | where a is any integer between 1 to 1859 of SEQ ID | AA101299, AA223395, AA419511, AA421963, AA421964, AA524699, AA532380, | |
| | NO: 238, b is an integer of 15 to 1873, where both a | AA614315, AA570194, AA742712, AA865440, AA887301, AA987486, AA988144, | |
| | and b correspond to the positions of nucleotide | A091175 | |
| | residues shown in SEQ ID NO: 238, and where b is | | |
| | greater than or equal to a + 14. | | |
| 829118 | Preferably excluded from the present invention are | | |
| | one or more polynucleotides comprising a nucleotide | | |
| | sequence described by the general formula of a − b, | | |
| | where a is any integer between 1 to 891 of SEQ ID | | |
| | NO: 239, b is an integer of 15 to 905, where both a and | | |
| | b correspond to the positions of nucleotide residues | | |
| | shown in SEQ ID NO: 239, and where b is greater than | | |
| | or equal to a + 14. | | |
| 829152 | Preferably excluded from the present invention are | T72498, T73568, T74363, T86984, R10378, R10477, T85969, R05924, R06022, H58205, | |
| | one or more polynucleotides comprising a nucleotide | H65999, H66000, N68870, N92084, N92944, AA188651, AA188754, N72345 | |
| | sequence described by the general formula of a − b, | | |
| | where a is any integer between 1 to 1470 of SEQ ID | | |
| | NO: 240, b is an integer of 15 to 1484, where both a | | |
| | and b correspond to the positions of nucleotide | | |
| | residues shown in SEQ ID NO: 240, and where b is | | |
| | greater than or equal to a + 14. | | |
| 829160 | Preferably excluded from the present invention are | R19077, R24890, R70937, R70989, R75822, R75823, R88030, H97197, | |
| | one or more polynucleotides comprising a nucleotide | H97205, H97610, H97622, H97640, H99011, N22163, N22211, N25706, N31618, | |
| | sequence described by the general formula of a − b, | N31627, N34096, N35586, N57066, N57078, N57083, N63961, N71248, N71530, | |
| | where a is any integer between 1 to 1507 of SEQ ID | N79638, W23686, W25345, W80523, W80524, AA027117, AA044025, AA044347, | |
| | NO: 241, b is an integer of 15 to 1521, where both a | AA056543, AA056646, AA082122, AA120870, AA120871, AA129173, AA129197, | |
| | and b correspond to the positions of nucleotide | AA173547, AA173713, AA190689, AA252595, AA258865, AA259007, AA576323, | |
| | residues shown in SEQ ID NO: 241, and where b is | AA768606, N55993, N84224 | |
| | greater than or equal to a + 14. | | |
| 829163 | Preferably excluded from the present invention are | R27150, H50951, N39917, N41848, N41877 | |
| | one or more polynucleotides comprising a nucleotide | | |
| | sequence described by the general formula of a − b, | | |
| | where a is any integer between 1 to 1130 of SEQ ID | | |
| | NO: 242, b is an integer of 15 to 1144, where both a | | |
| | and b correspond to the positions of nucleotide | | |
| | residues shown in SEQ ID NO: 242, and where b is | | |
| | greater than or equal to a + 14. | | |
| 829176 | Preferably excluded from the present invention are | T46875, T53785, T62036, T73807, R11065, R11122, T84299, T85183, R01714, R02656, | |
| | one or more polynucleotides comprising a nucleotide | R02737, R02738, H41134, H64904, H79712, H79713, N68598, N71315, N71366, | |
| | sequence described by the general formula of a − b, | N99798, W01984 | |
| | where a is any integer between 1 to 920 of SEQ ID | | |
| | NO: 243, b is an integer of 15 to 934, where both a and | | |
| | b correspond to the positions of nucleotide residues | | |
| | shown in SEQ ID NO: 243, and where b is greater than | | |
| | or equal to a + 14. | | |
| 829204 | Preferably excluded from the present invention are | R50489, R50573, R74498, R74499, AA234014, AA535362, AA554207, AA847239 | |
| | one or more polynucleotides comprising a nucleotide | | |
| | sequence described by the general formula of a − b, | | |
| | where a is any integer between 1 to 901 of SEQ ID | | |
| | NO: 244, b is an integer of 15 to 915, where both a and | | |
| | b correspond to the positions of nucleotide residues | | |
| | shown in SEQ ID NO: 244, and where b is greater than | | |
| | or equal to a + 14. | | |
| 829207 | Preferably excluded from the present invention are | | |
| | one or more polynucleotides comprising a nucleotide | | |
| | sequence described by the general formula of a − b, | | |
| | where a is any integer between 1 to 1262 of SEQ ID | | |
| | NO: 245, b is an integer of 15 to 1276, where both a | | |
| | and b correspond to the positions of nucleotide | | |
| | residues shown in SEQ ID NO: 245, and where b is | | |
| | greater than or equal to a + 14. | | |
| 829228 | Preferably excluded from the present invention are | T40764, T49773, T49774, H05098, H49148, H51985, H52105, N36154, N51490, | |
| | one or more polynucleotides comprising a nucleotide | N52526, N53635, AA054314, AA074167, AA152473, AA152472, AA188950, | |
| | sequence described by the general formula of a − b, | A278366, AA281330, AA468930, AA469004, AA482010, AA542938, AA554491, | |
| | where a is any integer between 1 to 3352 of SEQ ID | AA565215, AA579406, AA741363, AA807139, AA832066, AA836995, AA876036, | |
| | NO: 246, b is an integer of 15 to 3366, where both a | AA995854 | |
| | and b correspond to the positions of nucleotide | | |
| | residues shown in SEQ ID NO: 246, and where b is | | |
| | greater than or equal to a + 14. | | |
| 829252 | Preferably excluded from the present invention are | | |
| | one or more polynucleotides comprising a nucleotide | | |
| | sequence described by the general formula of a − b, | | |
| | where a is any integer between 1 to 2134 of SEQ ID | | |
| | NO: 247, b is an integer of 15 to 2148, where both a | | |
| | and b correspond to the positions of nucleotide | | |
| | residues shown in SEQ ID NO: 247, and where b is | | |
| | greater than or equal to a + 14. | | |
| 829254 | Preferably excluded from the present invention are | | |
| | one or more polynucleotides comprising a nucleotide | | |
| | sequence described by the general formula of a − b, | | |
| | where a is any integer between 1 to 2211 of SEQ ID | | |
| | NO: 248, b is an integer of 15 to 2225, where both a | | |
| | and b correspond to the positions of nucleotide | | |
| | residues shown in SEQ ID NO: 248, and where b is | | |
| | greater than or equal to a + 14. | | |
| 829269 | Preferably excluded from the present invention are | | |
| | one or more polynucleotides comprising a nucleotide | | |
| | sequence described by the general formula of a − b, | | |
| | where a is any integer between 1 to 1190 of SEQ ID | | |
| | NO: 249, b is an integer of 15 to 1204, where both a | | |
| | and b correspond to the positions of nucleotide | | |
| | residues shown in SEQ ID NO: 249, and where b is | | |
| | greater than or equal to a + 14. | | |
| 829277 | Preferably excluded from the present invention are | | |
| | one or more polynucleotides comprising a nucleotide | | |
| | sequence described by the general formula of a − b, | | |
| | where a is any integer between 1 to 1300 of SEQ ID | | |
| | NO: 250, b is an integer of 15 to 1314, where both a | | |
| | and b correspond to the positions of nucleotide | | |
| | residues shown in SEQ ID NO: 250, and where b is | | |
| | greater than or equal to a + 14. | | |
| 829290 | Preferably excluded from the present invention are | | |
| | one or more polynucleotides comprising a nucleotide | | |
| | sequence described by the general formula of a − b, | | |
| | where a is any integer between 1 to 1145 of SEQ ID | | |
| | NO: 251, b is an integer of 15 to 1159, where both a | | |
| | and b correspond to the positions of nucleotide | | |
| | residues shown in SEQ ID NO: 251, and where b is | | |
| | greater than or equal to a + 14. | | |
| 829294 | Preferably excluded from the present invention are | | |
| | one or more polynucleotides comprising a nucleotide | | |
| | sequence described by the general formula of a − b, | | |
| | where a is any integer between 1 to 2474 of SEQ ID | | |
| | NO: 252, b is an integer of 15 to 2488, where both a | | |
| | and b correspond to the positions of nucleotide | | |
| | residues shown in SEQ ID NO: 252, and where b is | | |
| | greater than or equal to a + 14. | | |
| 829299 | Preferably excluded from the present invention are | T82894, H25618, N48726, W52191, AA037331, AA223798, AA224330, AA635842, | |
| | one or more polynucleotides comprising a nucleotide | AA748884, AA826495, AA864458, AA903250, AA908466, AA931986, D81481, | |
| | sequence described by the general formula of a − b, | N56293, C02225 | |
| | where a is any integer between 1 to 1540 of SEQ ID | | |
| | NO: 253, b is an integer of 15 to 1554, where both a | | |
| | and b correspond to the positions of nucleotide | | |
| | residues shown in SEQ ID NO: 253, and where b is | | |
| | greater than or equal to a + 14. | | |
| 829308 | Preferably excluded from the present invention are | R13979, R17378, R40039, R42616, R42616, R42616, R40039, R56257, R56346, H05467, | |
| | one or more polynucleotides comprising a nucleotide | H07018, R86778, H99527, H99526, H99763, N24571, N25539, N25635, N28490, | |
| | sequence described by the general formula of a − b, | N30121, N34013, N34136, N34233, N35730, N49189, N50244, N92737, W20356, | |
| | where a is any integer between 1 to 1492 of SEQ ID | AA255602, AA262707, AA255576, AA262183, AA279758, AA570002, AA572777, | |
| | NO: 254, b is an integer of 15 to 1506, where both a | AA721016, AA814424, AA864521, AA902860, AA948310, A1024777, A1056401 | |
| | and b correspond to the positions of nucleotide | | |
| | residues shown in SEQ ID NO: 254, and where b is | | |
| | greater than or equal to a + 14. | | |
| 829349 | Preferably excluded from the present invention are | T39288, T47082, T50451, T50586, T59000, T59073, T59535, T59586, T63704, T63861, | |
| | one or more polynucleotides comprising a nucleotide | T69920, T69974, T71240, T72474, T72943, T90268, T90710, T83786, T95048, R31368, | |
| | sequence described by the general formula of a − b, | R33435, R34369, R34489, R73911, R80467, R80667, R94351, R97310, R97345, | |
| | where a is any integer between 1 to 640 of SEQ ID | H57329, H57376, H62783, H64845, H65444, H82981, H83214, H93955, H93956, | |
| | NO: 255, b is an integer of 15 to 654, where both a and | N29780, N42940, N45379, N57200, N80805, W06876, W15396, W47162, W47283, | |
| | correspond to the positions of nucleotide residues | W52164, W52024, W52758, W73045, W73275, W73604, W73643, W86783, W87274, | |
| | shown in SEQ ID NO: 255, and where b is greater than | AA009954, AA010849, AA011288, AA022621, AA022757, AA025805, AA025929, | |
| | or equal to a + 14. | AA025968, AA046835, AA054475, AA058513, AA063327, AA075215, AA075451, | |
| | | AA088739, AA088740, AA099371, AA099457, AA112397, AA113053, AA121065, | |
| | | AA121066, AA132025, AA132147, AA132237, AA132357, AA146935, AA147721, | |
| | | AA147756, AA147602, AA148113, AA156063, AA157120, AA157223, AA157610, | |
| | | AA165107, AA164710, AA173741, AA173185, AA187331, AA187332, AA187293, | |
| | | AA187393, AA187741, AA188097, AA187033, AA188455, AA188457, AA188467, | |
| | | AA216356, AA228668, AA229001, AA228993, AA229108, AA397406, AA482922, | |
| | | AA483319, AA483431, AA491567, AA501502, AA507889, AA508445, AA513947, | |
| | | AA515053, AA522563, AA523140, AA525478, AA524922, AA526106, AA534088, | |
| | | AA535846, AA548219, AA552477, AA555012, AA558315, AA564882, AA565458, | |
| | | F16817, F16991, F17527, AA582793, AA587225, AA588487, AA595626, AA602055, | |
| | | AA602240, AA603392, AA631634, AA638971, AA639988, AA640535, AA576051, | |
| | | AA576894, AA566049, AA655021, AA659001, AA661609, AA662354, AA664631, | |
| | | AA664721, AA664980, AA665338, AA688035, AA714993, AA715012, AA720861, | |
| | | AA730373, AA730633, AA742678, AA742934, AA746812, AA747153, AA747192, | |
| | | AA747959, AA808437, AA836880, AA837645, AA838637, AA872341, AA876822, | |
| | | AA922665, AA961515, AA968734, AA970649, AA978219, AA988051, AA988404, | |
| | | AA991418, AA994111, A1002489, A1053409, A1053609, A1053760, A1082351, | |
| | | A1083631, N83854, N83948, N85971, N86260, N86628, N87758, AA641679, | |
| | | A642097, AA642839, C20758, AA092159, AA092465, AA094493 | |
| 829354 | Preferably excluded from the present invention are | | |
| | one or more polynucleotides comprising a nucleotide | | |
| | sequence described by the general formula of a − b, | | |
| | where a is any integer between 1 to 1978 of SEQ ID | | |
| | NO: 256, b is an integer of 15 to 1992, where both a | | |
| | and b correspond to the positions of nucleotide | | |
| | residues shown in SEQ ID NO: 256, and where b is | | |
| | greater than or equal to a + 14. | | |
| 829388 | Preferably excluded from the present invention are | | |
| | one or more polynucleotides comprising a nucleotide | | |
| | sequence described by the general formula of a − b, | | |
| | where a is any integer between 1 to 2259 of SEQ ID | | |
| | NO: 257, b is an integer of 15 to 2273, where both a | | |
| | and b correspond to the positions of nucleotide | | |
| | residues shown in SEQ ID NO: 257, and where b is | | |
| | greater than or equal to a + 14. | | |
| 829540 | Preferably excluded from the present invention are | N26408, N28830, N28838, N31522, W15157, W81560, W81561, AA126749, AA126756, | |
| | one or more polynucleotides comprising a nucleotide | AA126772, AA187148 | |
| | sequence described by the general formula of a − b, | | |
| | where a is any integer between 1 to 1490 of SEQ ID | | |
| | NO: 258, b is an integer of 15 to 1504, where both a | | |
| | and b correspond to the positions of nucleotide | | |
| | residues shown in SEQ ID NO: 258, and where b is | | |
| | greater than or equal to a + 14. | | |
| 829626 | Preferably excluded from the present invention are | | |
| | one or more polynucleotides comprising a nucleotide | | |
| | sequence described by the general formula of a − b, | | |
| | where a is any integer between 1 to 1778 of SEQ ID | | |
| | NO: 259, b is an integer of 15 to 1792, where both a | | |
| | and b correspond to the positions of nucleotide | | |
| | residues shown in SEQ ID NO: 259, and where b is | | |
| | greater than or equal to a + 14. | | |
| 829730 | Preferably excluded from the present invention are | | |
| | one or more polynucleotides comprising a nucleotide | | |
| | sequence described by the general formula of a − b, | | |
| | where a is any integer between 1 to 2034 of SEQ ID | | |
| | NO: 260, b is an integer of 15 to 2048, where both a | | |
| | and b correspond to the positions of nucleotide | | |
| | residues shown in SEQ ID NO: 260, and where b is | | |
| | greater than or equal to a + 14. | | |
| 829892 | Preferably excluded from the present invention are | R84306, N99830, N90467, AA113938, AA192541, AA243317, L44546, AA713588 | |
| | one or more polynucleotides comprising a nucleotide | | |
| | sequence described by the general formula of a − b, | | |
| | where a is any integer between 1 to 1268 of SEQ ID | | |
| | NO: 261, b is an integer of 15 to 1282, where both a | | |
| | and b correspond to the positions of nucleotide | | |
| | residues shown in SEQ ID NO: 261, and where b is | | |
| | greater than or equal to a + 14. | | |
| 829933 | Preferably excluded from the present invention are | AA121059, AA429187 | |
| | one or more polynucleotides comprising a nucleotide | | |
| | sequence described by the general formula of a − b, | | |
| | where a is any integer between 1 to 585 of SEQ ID | | |
| | NO: 262, b is an integer of 15 to 599, where both a and | | |
| | b correspond to the positions of nucleotide residues | | |
| | shown in SEQ ID NO: 262, and where b is greater than | | |
| | or equal to a + 14. | | |
| 829938 | Preferably excluded from the present invention are | AA001837, AA142857, AA235114, AA235222, AA614412, AA687460, AA857702, | |
| | one or more polynucleotides comprising a nucleotide | AA857893, AA962131, AA962521 | |
| | sequence described by the general formula of a − b, | | |
| | where a is any integer between 1 to 1247 of SEQ ID | | |
| | NO: 263, b is an integer of 15 to 1261, where both a | | |
| | and b correspond to the positions of nucleotide | | |
| | residues shown in SEQ ID NO: 263, and where b is | | |
| | greater than or equal to a + 14. | | |
| 829969 | Preferably excluded from the present invention are | R22931, R23036, H09755, H47088, N38971, N38985, N57545, AA075344, AA075597, | |
| | one or more polynucleotides comprising a nucleotide | AA136299, AA136180, AA279124, AA279243, AA279928, AA279929, AA909786, | |
| | sequence described by the general formula of a − b, | AI000293, N48117, N48131 | |
| | where a is any integer between 1 to 1006 of SEQ ID | | |
| | NO: 264, b is an integer of 15 to 1020, where both a | | |
| | and b correspond to the positions of nucleotide | | |
| | residues shown in SEQ ID NO: 264, and where b is | | |
| | greater than or equal to a + 14. | | |
| 829982 | Preferably excluded from the present invention are | H40097, N80803, N93871, W07650, W15482, W40363, W42635, W45238, W67482, | |
| | one or more polynucleotides comprising a nucleotide | W67483, W70331, W72456, W73235, W73290, W76515, W78220, AA040927, | |
| | sequence described by the general formula of a − b, | AA040928, AA074829, AA075095, AA083686, AA166708, AA167049, AA228843, | |
| | where a is any integer between 1 to 557 of SEQ ID | AA468686, AA469044, AA505509, AA548788, AA564157, AA595572, AA622149, | |
| | NO: 265, b is an integer of 15 to 571, where both a and | AA633298, AA576799, AA746697, AA807946, AA873193, AA903706, AA919114, | |
| | correspond to the positions of nucleotide residues | AA932502, AA938506, AA974058, AA977996, AI000750, N85073, N86741, N87037, | |
| | shown in SEQ ID NO: 265, and where b is greater than | N88197, N88746, AA090569 | |
| | or equal to a + 14. | | |
| 830007 | Preferably excluded from the present invention are | | |
| | one or more polynucleotides comprising a nucleotide | | |
| | sequence described by the general formula of a − b, | | |
| | where a is any integer between 1 to 1336 of SEQ ID | | |
| | NO: 266, b is an integer of 15 to 1350, where both a | | |
| | and b correspond to the positions of nucleotide | | |
| | residues shown in SEQ ID NO: 266, and where b is | | |
| | greater than or equal to a + 14. | | |
| 830019 | Preferably excluded from the present invention are | T61424, T53868, T61391, T63785, R23153, R23154, R23905, R64468, R65575, R69390, | |
| | one or more polynucleotides comprising a nucleotide | R69523, R79153, R79154, H14532, H14533, H47318, H47402, H53647, H61347, | |
| | sequence described by the general formula of a − b, | H93017, H94242, N29789, N42932, W57927, W58148, W67701, W68160, W74342, | |
| | where a is any integer between 1 to 1305 of SEQ ID | W81702, W81703, W94692, W95218, W95440, W95785, AA043712, AA056570, | |
| | NO: 267, his an integer of 15 to 1319, where both a | AA114073, AA133633, AA133634, AA151774, AA149729, AA149782, AA149795, | |
| | and b correspond to the positions of nucleotide | AA425861, AA425990, AA428095, AA428642, AA494401, AA515475, AA523534, | |
| | residues shown in SEQ ID NO: 267, and where b is | AA548827, AA552032, AA564916, F16977, AA593645, AA613557, AA617694, | |
| | greater than or equal to a + 14. | AA618542, AA576565, AA576574, AA746168, AA766359, AA833956, AA837906, | |
| | | AA857421, AA857877, AA903383, AA903849, AA903888, AA916517, AA922889, | |
| | | AA962544, AA970534, AA974964, AA975402, AA976089, AA983583, AA992448, | |
| | | F18477, C04429, C17306 | |
| 830073 | Preferably excluded from the present invention are | T93694, T96159, H04182, H04181, H15428, H48586, N74976, W05676, W44928, | |
| | one or more polynucleotides comprising a nucleotide | AA085826, AA085971, AA126446, AA425304, AA425408, AA280817, AA280995, | |
| | sequence described by the general formula of a − b, | AA287270, AA287417, AA668788, AA836455, AA977754 | |
| | where a is any integer between 1 to 3680 of SEQ ID | | |
| | NO: 268, b is an integer of 15 to 3694, where both a | | |
| | and b correspond to the positions of nucleotide | | |
| | residues shown in SEQ ID NO: 268, and where b is | | |
| | greater than or equal to a + 14. | | |
| 830130 | Preferably excluded from the present invention are | | |
| | one or more polynucleotides comprising a nucleotide | | |
| | sequence described by the general formula of a − b, | | |
| | where a is any integer between 1 to 1228 of SEQ ID | | |
| | NO: 269, b is an integer of 15 to 1242, where both a | | |
| | and b correspond to the positions of nucleotide | | |
| | residues shown in SEQ ID NO: 269, and where b is | | |
| | reater than or equal to a + 14. | | |
| 830134 | Preferably excluded from the present invention are | | |
| | one or more polynucleotides comprising a nucleotide | | |
| | sequence described by the general formula of a − b, | | |
| | where a is any integer between 1 to 2043 of SEQ ID | | |
| | NO: 270, b is an integer of 15 to 2057, where both a | | |
| | and b correspond to the positions of nucleotide | | |
| | residues shown in SEQ ID NO: 270, and where b is | | |
| | greater than or equal to a + 14. | | |
| 830135 | Preferably excluded from the present invention are | | |
| | one or more polynucleotides comprising a nucleotide | | |
| | sequence described by the general formula of a − b, | | |
| | where a is any integer between 1 to 946 of SEQ ID | | |
| | NO: 271, b is an integer of 15 to 960, where both a and | | |
| | b correspond to the positions of nucleotide residues | | |
| | shown in SEQ ID NO: 271, and where b is greater than | | |
| | or equal to a + 14. | | |
| 830148 | Preferably excluded from the present invention are | R15244, R31943, R31992, H06853, H06894, H13355, H30882, R84410, R84411, | |
| | one or more polynucleotides comprising a nucleotide | R94120, H53381, H97695, H99925, N46996, N69023, N77897, W00690, W19694, | |
| | sequence described by the general formula of a − b, | W38937, W74721, W74795, N89822, N89950, AA009490, AA009904, AA031349, | |
| | where a is any integer between 1 to 1153 of SEQ ID | AA031350, AA035629, AA035719, AA046140, AA062845, AA062905, AA079564, | |
| | NO: 272, b is an integer of 15 to 1167, where both a | AA079636, AA116062, AA116046, AA126968, AA148568, AA159591, AA160429, | |
| | and b correspond to the positions of nucleotide | AA161272, AA161273, AA160576, AA179774, AA180491, AA179635, AA182631, | |
| | residues shown in SEQ ID NO: 272, and where b is | AA182727, AA179634, AA192371, AA192282, AA199831, AA251312, AA256883, | |
| | greater than or equal to a + 14. | AA255477, AA430121, AA533720, AA551694, AA552307, AA552661, AA582138, | |
| | | A586611, AA587906, AA594387, AA602977, AA605299, AA633388, AA573941, | |
| | | A574038, AA579715, AA687647, AA741352, AA838339, AA857603, AA858082, | |
| | | A866081, AA865003, AA875861, AA910672, AA927563, A1076918, W21962 | |
| 830149 | Preferably excluded from the present invention are | R60249, R60762, R63751, R67526, H95029, H95095, N59347, N77158, W19778, | |
| | one or more polynucleotides comprising a nucleotide | AA047615, AA047555, AA047687, AA047738, AA056453, AA070880, AA112293, | |
| | sequence described by the general formula of a − b, | AA113105, AA112550, AA112614, AA158O15, AA158228, AA160995, AA160996, | |
| | where a is any integer between 1 to 2757 of SEQ ID | AA190555, AA191131, AA224574, AA227422, AA255563, AA255586, AA418477, | |
| | NO: 273, b is an integer of 15 to 2771, where both a | AA424689, AA470392, AA515485, AA515507, AA583475, AA588210, AA602533, | |
| | and b correspond to the positions of nucleotide | A573902, AA568354, AA746111, AA766146, AA804893, N83302 | |
| | residues shown in SEQ ID NO: 273, and where b is | | |
| | greater than or equal to a + 14. | | |
| 830154 | Preferably excluded from the present invention are | | |
| | one or more polynucleotides comprising a nucleotide | | |
| | sequence described by the general formula of a − b, | | |
| | where a is any integer between 1 to 1875 of SEQ ID | | |
| | NO: 274, b is an integer of 15 to 1889, where both a | | |
| | and b correspond to the positions of nucleotide | | |
| | residues shown in SEQ ID NO: 274, and where b is | | |
| | greater than or equal to a + 14. | | |
| 830183 | Preferably excluded from the present invention are | | |
| | one or more polynucleotides comprising a nucleotide | | |
| | sequence described by the general formula of a − b, | | |
| | where a is any integer between 1 to 590 of SEQ ID | | |
| | NO: 275, b is an integer of 15 to 604, where both a and | | |
| | b correspond to the positions of nucleotide residues | | |
| | shown in SEQ ID NO: 275, and where b is greater than | | |
| | or equal to a + 14. | | |
| 830194 | Preferably excluded from the present invention are | T51023, T51115, T52795, T53595, T56300, T56767, T59691, T59827, T59904, T63354, | |
| | one or more polynucleotides comprising a nucleotide | T72200, T72269, T92900, T92990, R07165, R07217, R44334, R49609, R44334, R49609, | |
| | sequence described by the general formula of a − b, | H11106, H20800, H22618, H42472, H43453, H50320, H50321, H69947, N20118, | |
| | where a is any integer between 1 to 1367 of SEQ ID | N21306, N26128, N63140, N67225, N67232, W45407, W56419, W56420, W72419, | |
| | NO: 276, b is an integer of 15 to 1381, where both a | W76279, W94626, W94710, AA029459, AA029524, AA034511, AA035053, AA035563, | |
| | and b correspond to the positions of nucleotide | AA039819, AA041465, AA053002, AA055974, AA056002, AA070356, AA070320, | |
| | residues shown in SEQ ID NO: 276, and where b is | AA074029, AA074039, AA074 189, AA074336, AA075645, AA075646, AA076380, | |
| | greater than or equal to a +14. | A084435, AA084465, AA084453, AA085290, AA086454, AA099172, AA101922, | |
| | | AA101959, AA099618, AA101011, AA112794, AA126226, AA126304, AA128510, | |
| | | AA129955, AA133875, AA128443, AA133328, AA133403, AA134003, AA130990, | |
| | | AA131028, AA132940, AA135158, AA135628, AA143273, AA146730, AA151853, | |
| | | AA155641, AA155696, AA155726, AA157967, AA158903, AA158902, AA158943, | |
| | | AA158944, AA159293, AA159526, AA161206, AA160558, AA160739, AA160740, | |
| | | AA165357, AA167787, AA169218, AA169512, AA169691, AA176365, AA179272, | |
| | | AA179388, AA180903, AA181001, AA181325, AA181508, AA182781, AA173899, | |
| | | AA187757, AA188120, AA186725, AA187070, AA187152, AA190896, AA199819, | |
| | | AA223210, AA223254, AA227038, AA232399, AA233288, AA243192, AA252285, | |
| | | AA492525, AA420611, AA420688, AA492171, AA492254, AA503950, AA507398, | |
| | | AA513704, AA513757, AA515944, AA525799, AA558212, AA563863, AA565107, | |
| | | F17110, AA582829, AA586678, AA603895, AA604163, AA568617, AA617883, | |
| | | AA622814, AA635987, AA569079, AA570078, AA570258, AA570419, AA573205, | |
| | | AA573965, AA574048, AA566065, AA748781, AA834135, AA837022, AA838454, | |
| | | AA838636, AA838049, AA838058, AA856831, AA909853, AA910298, AA927706, | |
| | | AA932101, AA937900, AA953604, AA969555, AA973234, AA978074, AA985430, | |
| | | AA985432, AA988742, AA994207, A1002611, A1014411, N84537, N85082, W22113, | |
| | | W22114, W22431, W22639, W23207, W23271, W29046, N88675, AA640915, | |
| | | A092777 | |
| 830207 | Preferably excluded from the present invention are | R51744, R88177, W05323, AA746479, AA761644, AA826038, W27619, AA64252 | |
| | one or more polynucleotides comprising a nucleotide | | |
| | sequence described by the general formula of a − b, | | |
| | where a is any integer between 1 to 1135 of SEQ ID | | |
| | NO: 277, b is an integer of 15 to 1149, where both a | | |
| | and b correspond to the positions of nucleotide | | |
| | residues shown in SEQ ID NO: 277, and where b is | | |
| | greater than or equal to a + 14. | | |
| 830242 | Preferably excluded from the present invention are | | |
| | one or more polynucleotides comprising a nucleotide | | |
| | sequence described by the general formula of a − b, | | |
| | where a is any integer between 1 to 797 of SEQ ID | | |
| | NO: 278, b is an integer of 15 to 811, where both a and | | |
| | b correspond to the positions of nucleotide residues | | |
| | shown in SEQ ID NO: 278, and where b is greater than | | |
| | or equal to a + 14. | | |
| 830328 | Preferably excluded from the present invention are | | |
| | one or more polynucleotides comprising a nucleotide | | |
| | sequence described by the general formula of a − b, | | |
| | where a is any integer between 1 to 1246 of SEQ ID | | |
| | NO: 279, b is an integer of 15 to 1260, where both a | | |
| | and b correspond to the positions of nucleotide | | |
| | residues shown in SEQ ID NO: 279, and where b is | | |
| | greater than or equal to a + 14. | | |
| 830340 | Preferably excluded from the present invention are | | |
| | one or more polynucleotides comprising a nucleotide | | |
| | sequence described by the general formula of a − b, | | |
| | where a is any integer between 1 to 1654 of SEQ ID | | |
| | NO: 280, b is an integer of 15 to 1668, where both a | | |
| | and b correspond to the positions of nucleotide | | |
| | residues shown in SEQ ID NO: 280, and where b is | | |
| | greater than or equal to a + 14. | | |
| 830341 | Preferably excluded from the present invention are | T62985, T63236, T71911, T66677, T66678, T80777, T81178, R16218, R16219, R67281, | |
| | one or more polynucleotides comprising a nucleotide | H15642, H15643, R96139, R96356, H61487, H61952, H62021, H62022, H62510 | |
| | sequence described by the general formula of a − b, | H62577, H62887, H63016, H65659, H65660, H72388, H72834, H80906, H97768, | |
| | where a is any integer between 1 to 2314 of SEQ ID | N30162, N35776, N52509, N66853, W44421, AA004323, AA004410, AA025214, | |
| | NO: 281, b is an integer of 15 to 2328, where both a | AA026003, AA040205, AA040849, AA079158, AA079159, AA137066, AA137080, | |
| | and b correspond to the positions of nucleotide | AA137137, AA136971, AA193479, AA532656, AA602312, AA828635, AA872751, | |
| | residues shown in SEQ ID NO: 281, and where b is | AA934418, D80729, C15337 | |
| | greater than or equal to a + 14. | | |
| 830351 | Preferably excluded from the present invention are | | |
| | one or more polynucleotides comprising a nucleotide | | |
| | sequence described by the general formula of a − b, | | |
| | where a is any integer between 1 to 942 of SEQ ID | | |
| | NO: 282, b is an integer of 15 to 956, where both a and | | |
| | correspond to the positions of nucleotide residues | | |
| | shown in SEQ ID NO: 282, and where b is greater than | | |
| | or equal to a + 14. | | |
| 830358 | Preferably excluded from the present invention are | | |
| | one or more polynucleotides comprising a nucleotide | | |
| | sequence described by the general formula of a − b, | | |
| | where a is any integer between 1 to 1388 of SEQ ID | | |
| | NO: 283, b is an integer of 15 to 1402, where both a | | |
| | and b correspond to the positions of nucleotide | | |
| | residues shown in SEQ ID NO: 283, and where b is | | |
| | greater than or equal to a + 14. | | |
| 830390 | Preferably excluded from the present invention are | | |
| | one or more polynucleotides comprising a nucleotide | | |
| | sequence described by the general formula of a − b, | | |
| | where a is any integer between 1 to 661 of SEQ ID | | |
| | NO: 284, b is an integer of 15 to 675, where both a and | | |
| | correspond to the positions of nucleotide residues | | |
| | shown in SEQ ID NO: 284, and where b is greater than | | |
| | or equal to a + 14. | | |
| 830400 | Preferably excluded from the present invention are | T40239, T41103, T60782, T61153, T92326, T95403, T16530, R16587, R46049, R49231, | |
| | one or more polynucleotides comprising a nucleotide | R49231, R46049, H26122, H26387, H67872, H67872, H97917, N23194, N29748, | |
| | sequence described by the general formula of a − b, | N57652, N64158, N67587, N77509, N80178, W03502, W23838, W57929, W72584, | |
| | where a is any integer between 1 to 1325 of SEQ ID | AA011087, AA011088, AA070667, AA074878, AA075068, AA075019, AA076166, | |
| | NO: 285, b is an integer of 15 to 1339, where both a | AA079857, AA082235, AA099016, AA099093, AA100754, AA113152, AA126886, | |
| | and b correspond to the positions of nucleotide | AA128207, AA126932, AA128546, AA130882, AA136302, AA136408, AA143052, | |
| | residues shown in SEQ ID NO: 285, and where b is | AA143693, AA148079, AA149931, AA151001, AA151091, AA155761, AA157290, | |
| | greater than or equal to a + 14. | AA160781, AA165535, AA173281, AA179903, AA180211, AA181162, AA181673, | |
| | | A181986, AA187551, AA191657, AA192202, AA196746, AA196944, AA223166, | |
| | | A224485, AA242866, AA397377, AA468734, AA514807, AA523669, AA534165, | |
| | | A534195, AA565551, AA565552, H67199, AA581627, AA588734, AA588752, | |
| | | A593857, AA595407, AA595555, AA603965, AA610486, AA614617, AA631563, | |
| | | A635960, AA636057, AA576256, AA577470, AA580124, AA580480, AA714208, | |
| | | AA728790, AA729276, AA729361, AA744895, AA745002, AA746940, AA746948, | |
| | | AA747346, AA804602, AA810873, AA833970, AA836938, AA838563, AA858405, | |
| | | AA872330, AA922975, AA946823, AA954185, AA962678, AA978008, AA985504, | |
| | | AA987717, AI004904, AI017374, AI075264, F19611, AI089951, N83301, AA082282, | |
| | | AA091465, AA093298, AA094459 | |
| 830437 | Preferably excluded from the present invention are | | |
| | one or more polynucleotides comprising a nucleotide | | |
| | sequence described by the general formula of a − b, | | |
| | where a is any integer between 1 to 1384 of SEQ ID | | |
| | NO: 286, b is an integer of 15 to 1398, where both a | | |
| | and b correspond to the positions of nucleotide | | |
| | residues shown in SEQ ID NO: 286, and where b is | | |
| | greater than or equal to a + 14. | | |
| 830458 | Preferably excluded from the present invention are | T47583, T47584, T49761, T50148, T50203, T47161, R11382, R14878, H18220, H18258, | |
| | one or more polynucleotides comprising a nucleotide | R92715, N78687, W20222, W58210, W58319, W72115, W77801, W79332, W79431, | |
| | sequence described by the general formula of a − b, | W79487, W79631, W94437, N90582, AA043441, AA043442, AA148009, AA147947, | |
| | where a is any integer between 1 to 912 of SEQ ID | AA150837, AA224863, AA225964, AA226110, AA259194, AA259193, AA420769, | |
| | NO: 287, b is an integer of 15 to 926, where both a and | AA420829, AA470787, AA493672, AA501962, AA502082, AA506908, AA528607, | |
| | b correspond to the positions of nucleotide residues | AA588435, AA603500, AA603814, AA627229, AA627233, AA627240, AA632058, | |
| | shown in SEQ ID NO: 287, and where b is greater than | AA632689, AA639239, AA579023, AA580698, AA662633, AA661967, AA665215, | |
| | or equal to a + 14. | AA729443, AA730546, AA737851, AA745424, AA745526, AA747036, AA878568, | |
| | | A879157, AA886627, AA902180, AA922294, AA933050, AA962580, AA977360, | |
| | | A985679, AA996058, AA996145, A1053546, A1085892, N83274, W15194, N88934, | |
| | | C04128, AA640839, AA091328, AA093116, AA094048, AA094287 | |
| 830466 | Preferably excluded from the present invention are | | |
| | one or more polynucleotides comprising a nucleotide | | |
| | sequence described by the general formula of a − b, | | |
| | where a is any integer between 1 to 3080 of SEQ ID | | |
| | NO: 288, b is an integer of 15 to 3094, where both a | | |
| | and b correspond to the positions of nucleotide | | |
| | residues shown in SEQ ID NO: 288, and where b is | | |
| | greater than or equal to a + 14. | | |
| 830497 | Preferably excluded from the present invention are | T47088, T47089, T58430, T58462, R00971, H42144, N77388, W51953, W52502, | |
| | one or more polynucleotides comprising a nucleotide | AA036671, AA114976, AA593693, AA575857, C01052 | |
| | sequence described by the general formula of a − b, | | |
| | where a is any integer between 1 to 1969 of SEQ ID | | |
| | NO: 289, b is an integer of 15 to 1983, where both a | | |
| | and b correspond to the positions of nucleotide | | |
| | residues shown in SEQ ID NO: 289, and where b is | | |
| | greater than or equal to a + 14. | | |
| 830511 | Preferably excluded from the present invention are | | |
| | one or more polynucleotides comprising a nucleotide | | |
| | sequence described by the general formula of a − b, | | |
| | where a is any integer between 1 to 1284 of SEQ ID | | |
| | NO: 290, b is an integer of 15 to 1298, where both a | | |
| | and b correspond to the positions of nucleotide | | |
| | residues shown in SEQ ID NO: 290, and where b is | | |
| | greater than or equal to a + 14. | | |
| 830512 | Preferably excluded from the present invention are | | |
| | one or more polynucleotides comprising a nucleotide | | |
| | sequence described by the general formula of a − b, | | |
| | where a is any integer between 1 to 2445 of SEQ ID | | |
| | NO: 291, b is an integer of 15 to 2459, where both a | | |
| | and b correspond to the positions of nucleotide | | |
| | residues shown in SEQ ID NO: 291, and where b is | | |
| | greater than or equal to a + 14. | | |
| 830513 | Preferably excluded from the present invention are | | |
| | one or more polynucleotides comprising a nucleotide | | |
| | sequence described by the general formula of a − b, | | |
| | where a is any integer between 1 to 556 of SEQ ID | | |
| | NO: 292, b is an integer of 15 to 570, where both a and | | |
| | b correspond to the positions of nucleotide residues | | |
| | shown in SEQ ID NO: 292, and where b is greater than | | |
| | or equal to a + 14. | | |
| 830540 | Preferably excluded from the present invention are | T66458, T98908, R15832, R21916, R22565, H12306, R99043, H57499, H82961, | |
| | one or more polynucleotides comprising a nucleotide | AA046203, AA046283, AA055081, AA055141, AA173411, AA173467, AA173996, | |
| | sequence described by the general formula of a − b, | AA176693 | |
| | where a is any integer between 1 to 2454 of SEQ ID | | |
| | NO: 293, b is an integer of 15 to 2468, where both a | | |
| | and b correspond to the positions of nucleotide | | |
| | residues shown in SEQ ID NO: 293, and where b is | | |
| | greater than or equal to a + 14. | | |
| 830550 | Preferably excluded from the present invention are | R50040, R60172, R71512, H09125, H09475, H21789, R84538, R85928, R94762, | |
| | one or more polynucleotides comprising a nucleotide | R96633, R96680, R97580, H53135, H53241, H82960, H83191, N68166, N68684, | |
| | sequence described by the general formula of a − b, | N77903, N80174, N80625, N92442, N93242, N93314, N98261, W03498, W05839, | |
| | where a is any integer between 1 to 1066 of SEQ ID | W20000, W25100, W31279, W37087, W60751, W67554, W67583, W73877, W77814, | |
| | NO: 294, b is an integer of 15 to 1080, where both a | W80412, W95868, W95954, N91343, AA026891, AA026892, AA033547, AA034170, | |
| | and b correspond to the positions of nucleotide | AA069175, AA088435, AA151307, AA161037, AA237097, AA251326, AA251729, | |
| | residues shown in SEQ ID NO: 294, and where b is | AA428848, AA429940, AA287366, AA287504, AA470593, AA470594, AA514493, | |
| | greater than or equal to a + 14. | AA564438, H67293, AA582501, AA583172, AA587111, AA602517, AA603483, | |
| | | AA569955, AA732412, AA737913, AA810504, AA832193, AA857743, AA915872, | |
| | | AA915896, AA915992, AA948498, AA983538, AA991546, A1052409, AI053921 | |
| 830567 | Preferably excluded from the present invention are | R69708, R75813, R75814, N22294, N47088, N50300, N50983, N81194, N3236, | |
| | one or more polynucleotides comprising a nucleotide | AA074258, AA083867, AA083973, AA195801, AA196063, AA252500, AA252415, | |
| | sequence described by the general formula of a − b, | AA258014, AA287593, AA291332, AA492017, AA522597, AA617684, AA713960, | |
| | where a is any integer between 1 to 2681 of SEQ ID | AA740158, AA749386, AA808100, AA808680, AA814350, AA826203, AA831453, | |
| | NO: 295, b is an integer of 15 to 2695, where both a | AA887306, AA918645, AA972761, N88184 | |
| | and b correspond to the positions of nucleotide | | |
| | residues shown in SEQ ID NO: 295, and where b is | | |
| | greater than or equal to a + 14. | | |
| 830586 | Preferably excluded from the present invention are | R99131, H81094, W01508, AA045861, AA085947, AA102188, AA146772, AA148854, | |
| | one or more polynucleotides comprising a nucleotide | AA233843, AA424679, AA491204, AA514459, AA532818, AA809984, AA838521, | |
| | sequence described by the general formula of a − b, | AA954880, AI089939 | |
| | where a is any integer between 1 to 1380 of SEQ ID | | |
| | NO: 296, b is an integer of 15 to 1394, where both a | | |
| | and b correspond to the positions of nucleotide | | |
| | residues shown in SEQ ID NO: 296, and where b is | | |
| | greater than or equal to a + 14. | | |
| 830632 | Preferably excluded from the present invention are | T47818, R21519, R21621, R22056, R22112, R31393, R32890, R48823, R48824, R66656 | |
| | one or more polynucleotides comprising a nucleotide | R67377, R71682, H25037, H25038, H25842, H26215, H26515, H26994, | |
| | sequence described by the general formula of a − b, | H28313, H29756, H30178, H41920, H41966, H42490, H43473, R83733, R85464, | |
| | where a is any integer between 1 to 984 of SEQ ID | R88798, R89058, R93321, H52733, H59363, H60020, H73314, H73513, H80831, | |
| | NO: 297, b is an integer of 15 to 998, where both a and | H80832, H82603, H86794, H86795, H86853, H86852, H92710, H96832, H98741, | |
| | correspond to the positions of nucleotide residues | N23451, N23463, N26478, N26861, N31350, N31593, N35529, N39970, N42652, | |
| | shown in SEQ ID NO: 297, and where b is greater than | N62104, N74283, N76446, N78334, N92771, W04383, W19424, W20392, W24569, | |
| | or equal to a + 14. | W35168, W60060, W60111, W84373, W84420, AA025658, AA029558, AA062705, | |
| | | AA062707, AA063390, AA062771, AA081934, AA126557, AA136019, AA151638, | |
| | | AA192245, AA194655, AA470430, AA493634, AA552261, AA552348, AA565278, | |
| | | AA565462, AA583788, AA593646, AA594277, AA604853, AA613755, AA632449, | |
| | | AA632505, AA657974, AA730677, AA730804, AA748100, AA765824, AA857805, | |
| | | AA954102, AA961763, AA962500, AA974525, AA983564, AA987422, AA987934, | |
| | | AA989423, A1000235, F19140, N84058, N84994, C03222, AA091370, AA091545 | |
| 830645 | Preferably excluded from the present invention are | | |
| | one or more polynucleotides comprising a nucleotide | | |
| | sequence described by the general formula of a − b, | | |
| | where a is any integer between 1 to 1652 of SEQ ID | | |
| | NO: 298, b is an integer of 15 to 1666, where both a | | |
| | and b correspond to the positions of nucleotide | | |
| | residues shown in SEQ ID NO: 298, and where b is | | |
| | greater than or equal to a + 14. | | |
| 830652 | Preferably excluded from the present invention are | | |
| | one or more polynucleotides comprising a nucleotide | | |
| | sequence described by the general formula of a − b, | | |
| | where a is any integer between 1 to 2430 of SEQ ID | | |
| | NO: 299, b is an integer of 15 to 2444, where both a | | |
| | and b correspond to the positions of nucleotide | | |
| | residues shown in SEQ ID NO: 299, and where b is | | |
| | greater than or equal to a + 14. | | |
| 830659 | Preferably excluded from the present invention are | T65101, T66494, T66636, T84051, T86086, R05580, R13805, R15868, R16050, H05221, | |
| | one or more polynucleotides comprising a nucleotide | H05222, H13512, H16069, H18275, H21247, H44169, R83705, R92365, H48479, | |
| | sequence described by the general formula of a − b, | H48643, H54436, H54526, H73472, H73726, H97495, N29822, N30479, N31551, | |
| | where a is any integer between 1 to 1012 of SEQ ID | N32563, N39176, N39961, N45251, N68667, N91684, W07693, W32510, W32607, | |
| | NO: 300, b is an integer of 15 to 1026, where both a | W38017, W74179, W79849, AA018138, AA028191, AA033572, AA033571, AA042915, | |
| | and b correspond to the positions of nucleotide | AA043002, AA053878, AA054501, AA058344, AA099556, AA101993, AA134643, | |
| | residues shown in SEQ ID NO: 300, and where b is | AA143525, AA176419, AA424269, AA555196, AA769107, AA987653, A1076212, | |
| | greater than or equal to a + 14. | N84624, N85006, AI084132, AI084154, AA094327 | |
| 830696 | Preferably excluded from the present invention are | | |
| | one or more polynucleotides comprising a nucleotide | | |
| | sequence described by the general formula of a − b, | | |
| | where a is any integer between 1 to 816 of SEQ ID | | |
| | NO: 301, b is an integer of 15 to 830, where both a and | | |
| | b correspond to the positions of nucleotide residues | | |
| | shown in SEQ ID NO: 301, and where b is greater than | | |
| | or equal to a + 14. | | |
| 830706 | Preferably excluded from the present invention are | | |
| | one or more polynucleotides comprising a nucleotide | | |
| | sequence described by the general formula of a − b, | | |
| | where a is any integer between 1 to 3286 of SEQ ID | | |
| | NO: 302, b is an integer of 15 to 3300, where both a | | |
| | and b correspond to the positions of nucleotide | | |
| | residues shown in SEQ ID NO: 302, and where b is | | |
| | greater than or equal to a + 14. | | |
| 830743 | Preferably excluded from the present invention are | N30323, N56655, N69079, N69946, N80244, N98327, W07371, W42660, W45185, | |
| | one or more polynucleotides comprising a nucleotide | W55989, W56279, W68387, W68503, W72685, W74708, W74677, W77791, W80647, | |
| | sequence described by the general formula of a − b, | AA010723, AA011171, AA033537, AA034221, AA035773, AA056334, AA062820, | |
| | where a is any integer between 1 to 461 of SEQ ID | AA132021, AA132124, AA135594, AA135681, AA151293, AA151292, AA181331, | |
| | NO: 303, b is an integer of 15 to 475, where both a and | AA186392, AA187084, AA228662, AA228680, AA229819, AA468802, AA470869, | |
| | correspond to the positions of nucleotide residues | AA483684, AA491891, AA514852, AA533423, AA548946, AA563674, AA564612, | |
| | shown in SEQ ID NO: 303, and where b is greater than | AA594511, AA600707, AA622053, AA635767, AA639353, AA662887, AA664589, | |
| | or equal to a + 14. | AA729365, AA747035, AA747774, AA814124, AA873167, AA886626, AA903495, | |
| | | AA903981, AA922807, AA969768, AA973174, AA974282, AA976458, AA977143, | |
| | | AA983332, AI025140, A1066527, F19035, F19464, C03984, C13986, C14221, C14299, | |
| | | C14336, C14341, C14380, C14385, C14396, C14434, C14483, C14504, C14513, C15788 | |
| 830770 | Preferably excluded from the present invention are | | |
| | one or more polynucleotides comprising a nucleotide | | |
| | sequence described by the general formula of a − b, | | |
| | where a is any integer between 1 to 2888 of SEQ ID | | |
| | NO: 304, b is an integer of 15 to 2902, where both a | | |
| | and b correspond to the positions of nucleotide | | |
| | residues shown in SEQ ID NO: 304, and where b is | | |
| | greater than or equal to a + 14. | | |
| 830830 | Preferably excluded from the present invention are | | |
| | one or more polynucleotides comprising a nucleotide | | |
| | sequence described by the general formula of a − b, | | |
| | where a is any integer between 1 to 1539 of SEQ ID | | |
| | NO: 305, b is an integer of 15 to 1553, where both a | | |
| | and b correspond to the positions of nucleotide | | |
| | residues shown in SEQ ID NO: 305, and where b is | | |
| | greater than or equal to a + 14. | | |
| 830838 | Preferably excluded from the present invention are | | |
| | one or more polynucleotides comprising a nucleotide | | |
| | sequence described by the general formula of a − b, | | |
| | where a is any integer between 1 to 1973 of SEQ ID | | |
| | NO: 306, b is an integer of 15 to 1987, where both a | | |
| | and b correspond to the positions of nucleotide | | |
| | residues shown in SEQ ID NO: 306, and where b is | | |
| | greater than or equal to a + 14. | | |
| 830851 | Preferably excluded from the present invention are | | |
| | one or more polynucleotides comprising a nucleotide | | |
| | sequence described by the general formula of a − b, | | |
| | where a is any integer between 1 to 771 of SEQ ID | | |
| | NO: 307, b is an integer of 15 to 785, where both a and | | |
| | b correspond to the positions of nucleotide residues | | |
| | shown in SEQ ID NO: 307, and where b is greater than | | |
| | or equal to a + 14. | | |
| 830853 | Preferably excluded from the present invention are | | |
| | one or more polynucleotides comprising a nucleotide | | |
| | sequence described by the general formula of a − b, | | |
| | where a is any integer between 1 to 2164 of SEQ ID | | |
| | NO: 308, b is an integer of 15 to 2178, where both a | | |
| | and b correspond to the positions of nucleotide | | |
| | residues shown in SEQ ID NO: 308, and where b is | | |
| | greater than or equal to a + 14. | | |
| 830856 | Preferably excluded from the present invention are | | |
| | ne or more polynucleotides comprising a nucleotide | | |
| | sequence described by the general formula of a − b, | | |
| | where a is any integer between 1 to 861 of SEQ ID | | |
| | NO: 309, b is an integer of 15 to 875, where both a and | | |
| | b correspond to the positions of nucleotide residues | | |
| | shown in SEQ ID NO: 309, and where b is greater than | | |
| | or equal to a + 14. | | |
| 830862 | Preferably excluded from the present invention are | T46908, T46909, T46921, T46922, T50921, T52918, T53038, T56001, T59028, T94115, | |
| | one or more polynucleotides comprising a nucleotide | T94204, R53898, R53908, H02747, H27523, H77792, H88026, H88248, H90255, | |
| | sequence described by the general formula of a − b, | H96065, H88248, N21994, N64072, N73723, N74262, N75815, N77939, W03894, | |
| | where a is any integer between 1 to 742 of SEQ ID | W23887, AA081082, AA113423, AA115852, AA143290, AA143335, AA146868, | |
| | NO: 310, b is an integer of 15 to 756, where both a and | AA157054, AA157208, AA179118, AA187792, AA188385, AA468513, AA46893, | |
| | correspond to the positions of nucleotide residues | AA501970, AA523481, AA528461, AA533759, AA533618, AA535287, AA541570, | |
| | shown in SEQ ID NO: 310, and where b is greater than | AA558529, L44430, AA604961, AA568927, AA659814, AA661481, AA661996, | |
| | or equal to a + 14. | AA731036, AA748135, AA847331, AA878667, AA885549, AA935403, AA938035, | |
| | | AI001062, F19242, N83489, N83646, N84328, N85002, N85 167, N85223, N85325, | |
| | | N85833, N85949, N86287, N86329, N87923, N83150, AA642852, AA091775, | |
| | | AA093919 | |
| 830879 | Preferably excluded from the present invention are | T62074, T62130, T67747, T67857, R44816, H13822, H29311, | |
| | one or more polynucleotides comprising a nucleotide | W37451, N90567, AA128266, AA164552, AA235044, AA236012, AA746229, | |
| | sequence described by the general formula of a − b, | AA962194, AA987868, AA994828, A1000188, A1015557 | |
| | where a is any integer between 1 to 837 of SEQ ID | | |
| | NO: 311, b is an integer of 15 to 851, where both a and | | |
| | b correspond to the positions of nucleotide residues | | |
| | shown in SEQ ID NO: 311, and where b is greater than | | |
| | or equal to a + 14. | | |
| 830919 | Preferably excluded from the present invention are | | |
| | one or more polynucleotides comprising a nucleotide | | |
| | sequence described by the general formula of a − b, | | |
| | where a is any integer between 1 to 1321 of SEQ ID | | |
| | NO: 312, b is an integer of 15 to 1335, where both a | | |
| | and b correspond to the positions of nucleotide | | |
| | residues shown in SEQ ID NO: 312, and where b is | | |
| | greater than or equal to a + 14. | | |
| 830969 | Preferably excluded from the present invention are | | |
| | one or more polynucleotides comprising a nucleotide | | |
| | sequence described by the general formula of a − b, | | |
| | where a is any integer between 1 to 502 of SEQ ID | | |
| | NO: 313, b is an integer of 15 to 516, where both a and | | |
| | b correspond to the positions of nucleotide residues | | |
| | shown in SEQ ID NO: 313, and where b is greater than | | |
| | or equal to a + 14. | | |
| 830991 | Preferably excluded from the present invention are | | |
| | one or more polynucleotides comprising a nucleotide | | |
| | sequence described by the general formula of a − b, | | |
| | where a is any integer between 1 to 1819 of SEQ ID | | |
| | NO: 314, b is an integer of 15 to 1833, where both a | | |
| | and b correspond to the positions of nucleotide | | |
| | residues shown in SEQ ID NO: 314, and where b is | | |
| | greater than or equal to a + 14. | | |
| 831002 | Preferably excluded from the present invention are | | |
| | one or more polynucleotides comprising a nucleotide | | |
| | sequence described by the general formula of a − b, | | |
| | where a is any integer between 1 to 1340 of SEQ ID | | |
| | NO: 315, b is an integer of 15 to 1354, where both a | | |
| | and b correspond to the positions of nucleotide | | |
| | residues shown in SEQ ID NO: 315, and where b is | | |
| | greater than or equal to a + 14. | | |
| 831003 | Preferably excluded from the present invention are | T64373, N48387, W52748, W52754, W70187, AA029541, AA034463, AA058497, | |
| | one or more polynucleotides comprising a nucleotide | AA082001, AA082284, AA085967, AA088397, AA133444, AA133477, AA149568, | |
| | sequence described by the general formula of a − b, | AAA187408, AA226818, AA226855 | |
| | where a is any integer between 1 to 2407 of SEQ ID | | |
| | NO: 316, b is an integer of 15 to 2421, where both a | | |
| | and b correspond to the positions of nucleotide | | |
| | residues shown in SEQ ID NO: 316, and where b is | | |
| | greater than or equal to a + 14. | | |
| 831021 | Preferably excluded from the present invention are | | |
| | one or more polynucleotides comprising a nucleotide | | |
| | sequence described by the general formula of a − b, | | |
| | where a is any integer between 1 to 1078 of SEQ ID | | |
| | NO: 317, b is an integer of 15 to 1092, where both a | | |
| | and b correspond to the positions of nucleotide | | |
| | residues shown in SEQ ID NO: 317, and where b is | | |
| | greater than or equal to a + 14. | | |
| 831036 | Preferably excluded from the present invention are | | |
| | one or more polynucleotides comprising a nucleotide | | |
| | sequence described by the general formula of a − b, | | |
| | where a is any integer between 1 to 1366 of SEQ ID | | |
| | NO: 318, b is an integer of 15 to 1380, where both a | | |
| | and b correspond to the positions of nucleotide | | |
| | residues shown in SEQ ID NO: 318, and where b is | | |
| | greater than or equal to a + 14. | | |
| 831071 | Preferably excluded from the present invention are | | |
| | one or more polynucleotides comprising a nucleotide | | |
| | sequence described by the general formula of a − b, | | |
| | where a is any integer between 1 to 2598 of SEQ ID | | |
| | NO: 319, b is an integer of 15 to 2612, where both a | | |
| | and b correspond to the positions of nucleotide | | |
| | residues shown in SEQ ID NO: 319, and where b is | | |
| | greater than or equal to a + 14. | | |
| 831094 | Preferably excluded from the present invention are | | |
| | one or more polynucleotides comprising a nucleotide | | |
| | sequence described by the general formula of a − b, | | |
| | where a is any integer between 1 to 929 of SEQ ID | | |
| | NO: 320, b is an integer of 15 to 943, where both a and | | |
| | b correspond to the positions of nucleotide residues | | |
| | shown in SEQ ID NO: 320, and where b is greater than | | |
| | or equal to a + 14. | | |
| 831099 | Preferably excluded from the present invention are | T58120, T90056, T90158, T94290, T94639, R69200, R69590, R69678, R76031, H65424, | |
| | one or more polynucleotides comprising a nucleotide | H65425, N32273, N40465, N47619, N48504, N66482, N67212, N67243, N67881, | |
| | sequence described by the general formula of a − b, | N71915, N72302, N92538, N94512, W03004, W06930, W20370, W23962, W38380, | |
| | where a is any integer between 1 to 2945 of SEQ ID | W38525, W38716, W39486, W42582, W42594, W44824, W48665, W51898, W52474, | |
| | NO: 321, b is an integer of 15 to 2959, where both a | W53040, W60142, N90075, N90423, AA025009, AA024962, AA029382, AA029726, | |
| | and b correspond to the positions of nucleotide | AA031500, AAO31546, AA037283, AA037749, AA039259, AA044145, AA044261, | |
| | residues shown in SEQ ID NO: 321, and where b is | AA065061, AA070027, AA082386, AA083544, AA083757, AA088692, AA088829, | |
| | greater than or equal to a + 14. | AA099577, AA100236, AA100245, AA100517, AA112739, AA112091, AA116055, | |
| | | AA130509, AA130510, AA132145, AA135909, AA136308, AA136413, AA136528, | |
| | | AA136751, AA146853, AA146852, AA148049, AA156943, AA159808, AA165022, | |
| | | AA173867, AA181803, AA182563, AA182776, AA186553, AA186858, AA192463, | |
| | | AA194658, AA255837, AA261995, AA423999, AA493599, AA228337, AA228348, | |
| | | AA506755, AA506420, AA513968, AA514542, AA522900, AA524125, AA551485, | |
| | | AA553912, AA563900, AA594966, AA602651, AA610339, AA610361, AA614772, | |
| | | AA618333, AA576828, AA665045, AA714493, AA729997, AA738153, AA768641, | |
| | | AA804931, AA806122, AA827914, AA857664. AA876216, AA877173, AA877646, | |
| | | AA894385, AA922728, AA947835, AA977110, AA984009, AA988275, AA988567, | |
| | | N84005, N84600, N84939, N85553, AI084028, N86141, N88049, N89450, N89451, | |
| | | C02877, C02980, C03631, C05243, C05332, C05993, AA642453, AA090838, | |
| | | AA089614, AA091652, AA093130, AA093851 | |
| 831113 | Preferably excluded from the present invention are | AA122085, AA147371, AI005336 | |
| | one or more polynucleotides comprising a nucleotide | | |
| | sequence described by the general formula of a − b, | | |
| | where a is any integer between 1 to 788 of SEQ ID | | |
| | NO: 322, b is an integer of 15 to 802, where both a and | | |
| | b correspond to the positions of nucleotide residues | | |
| | shown in SEQ ID NO: 322, and where b is greater than | | |
| | or equal to a + 14. | | |
| 831120 | Preferably excluded from the present invention are | | |
| | one or more polynucleotides comprising a nucleotide | | |
| | sequence described by the general formula of a − b, | | |
| | where a is any integer between 1 to 1710 of SEQ ID | | |
| | NO: 323, b is an integer of 15 to 1724, where both a | | |
| | and b correspond to the positions of nucleotide | | |
| | residues shown in SEQ ID NO: 323, and where b is | | |
| | greater than or equal to a + 14. | | |
| 831172 | Preferably excluded from the present invention are | | |
| | one or more polynucleotides comprising a nucleotide | | |
| | sequence described by the general formula of a − b, | | |
| | where a is any integer between 1 to 2247 of SEQ ID | | |
| | NO: 324, b is an integer of 15 to 2261, where both a | | |
| | and b correspond to the positions of nucleotide | | |
| | residues shown in SEQ ID NO: 324, and where b is | | |
| | greater than or equal to a + 14. | | |
| 831178 | Preferably excluded from the present invention are | | |
| | one or more polynucleotides comprising a nucleotide | | |
| | sequence described by the general formula of a − b, | | |
| | where a is any integer between 1 to 1199 of SEQ ID | | |
| | NO: 325, b is an integer of 15 to 1213, where both a | | |
| | and b correspond to the positions of nucleotide | | |
| | residues shown in SEQ ID NO: 325, and where b is | | |
| | greater than or equal to a + 14. | | |
| 831184 | Preferably excluded from the present invention are | | |
| | one or more polynucleotides comprising a nucleotide | | |
| | sequence described by the general formula of a − b, | | |
| | where a is any integer between 1 to 2750 of SEQ ID | | |
| | NO: 326, b is an integer of 15 to 2764, where both a | | |
| | and b correspond to the positions of nucleotide | | |
| | residues shown in SEQ ID NO: 326, and where b is | | |
| | greater than or equal to a + 14. | | |
| 831203 | Preferably excluded from the present invention are | | |
| | one or more polynucleotides comprising a nucleotide | | |
| | sequence described by the general formula of a − b, | | |
| | where a is any integer between 1 to 1750 of SEQ ID | | |
| | NO: 327, b is an integer of 15 to 1764, where both a | | |
| | and b correspond to the positions of nucleotide | | |
| | residues shown in SEQ ID NO: 327, and where b is | | |
| | greater than or equal to a + 14. | | |
| 831210 | Preferably excluded from the present invention are | AA057014, AA059289 | |
| | one or more polynucleotides comprising a nucleotide | | |
| | sequence described by the general formula of a − b, | | |
| | where a is any integer between 1 to 557 of SEQ ID | | |
| | NO: 328, b is an integer of 15 to 571, where both a and | | |
| | correspond to the positions of nucleotide residues | | |
| | shown in SEQ ID NO: 328, and where b is greater than | | |
| | or equal to a + 14. | | |
| 831228 | Preferably excluded from the present invention are | | |
| | one or more polynucleotides comprising a nucleotide | | |
| | sequence described by the general formula of a − b, | | |
| | where a is any integer between 1 to 459 of SEQ ID | | |
| | NO: 329, b is an integer of 15 to 473, where both a and | | |
| | b correspond to the positions of nucleotide residues | | |
| | shown in SEQ ID NO: 329, and where b is greater than | | |
| | or equal to a + 14. | | |
| 831256 | Preferably excluded from the present invention are | R17500, R48877, H12160, R84358, H90367, N33987, AA161057 | |
| | one or more polynucleotides comprising a nucleotide | | |
| | sequence described by the general formula of a − b, | | |
| | where a is any integer between 1 to 1321 of SEQ ID | | |
| | NO: 330, b is an integer of 15 to 1335, where both a | | |
| | and b correspond to the positions of nucleotide | | |
| | residues shown in SEQ ID NO: 330, and where b is | | |
| | greater than or equal to a + 14. | | |
| 831257 | Preferably excluded from the present invention are | T49922, T85470, R37545, H03610, AA005184, AA045346 | |
| | one or more polynucleotides comprising a nucleotide | | |
| | sequence described by the general formula of a − b, | | |
| | where a is any integer between 1 to 1032 of SEQ ID | | |
| | NO: 331, b is an integer of 15 to 1046, where both a | | |
| | and b correspond to the positions of nucleotide | | |
| | residues shown in SEQ ID NO: 33 1, and where b is | | |
| | greater than or equal to a + 14. | | |
| 831277 | Preferably excluded from the present invention are | | |
| | one or more polynucleotides comprising a nucleotide | | |
| | sequence described by the general formula of a − b, | | |
| | where a is any integer between 1 to 1297 of SEQ ID | | |
| | NO: 332, b is an integer of 15 to 1311, where both a | | |
| | and b correspond to the positions of nucleotide | | |
| | residues shown in SEQ ID NO: 332, and where b is | | |
| | greater than or equal to a + 14. | | |
| 831317 | Preferably excluded from the present invention are | T39850, T47708, T47709, T47863, T51491, T52507, T53819, T53951, T55884, T60330, | |
| | one or more polynucleotides comprising a nucleotide | T60359, T60364, T60380, T60480, T60634, T61198, T61280, T61878, T62028, T67704, | |
| | sequence described by the general formula of a − b, | T67742, T67780, T67853, T67910, T68010, T68058, T68132, T68154, T68379, T68998, | |
| | where a is any integer between 1 to 1430 of SEQ ID | T68999, T69078, T69079, T69119, T69177, T69442, T70496, T71707, T72285, T72505, | |
| | NO: 333, b is an integer of 15 to 1444, where both a | T72998, T73123, T73679, T73756, T73761, T73837, T74031, T74383, T74405, T74655, | |
| | and b correspond to the positions of nucleotide | T74784, T74798, T74892, T85320, T85533, R83453, R88738, R90989, R90995, H58528, | |
| | residues shown in SEQ ID NO: 333, and where b is | H59441, H60092, H60282, H60589, H67401, H67458, H72811, H79422, H80518, | |
| | greater than or equal to a + 14. | H80570, H91775, H91816, N57814, W60714, W60741, AA034367, AA040550, | |
| | | AA040667, AA242768, AA424551, AA424642, R29495, R29660, R29089, C21224 | |
| 831339 | Preferably excluded from the present invention are | | |
| | one or more polynucleotides comprising a nucleotide | | |
| | sequence described by the general formula of a − b, | | |
| | where a is any integer between 1 to 1016 of SEQ ID | | |
| | NO: 334, b is an integer of 15 to 1030, where both a | | |
| | and b correspond to the positions of nucleotide | | |
| | residues shown in SEQ ID NO: 334, and where b is | | |
| | greater than or equal to a + 14. | | |
| 831363 | Preferably excluded from the present invention are | T58736, T58803, T61766, T64470, T64610, T67816, T68878, T68952, T72450, T72511, | |
| | one or more polynucleotides comprising a nucleotide | T72968, T73613, T73939, H41914, 1141957, N75040, W05718, AA043436, AA043416, | |
| | sequence described by the general formula of a − b, | AA045231, AA058807, AA484773, AA502762, AA50381 1, AA527553, AA744171, | |
| | where a is any integer between 1 to 2113 of SEQ ID | AA902935, AA903099, AI002033 | |
| | NO: 335, b is an integer of 15 to 2127, where both a | | |
| | and b correspond to the positions of nucleotide | | |
| | residues shown in SEQ ID NO: 335, and where b is | | |
| | greater than or equal to a + 14. | | |
| 831367 | Preferably excluded from the present invention are | | |
| | one or more polynucleotides comprising a nucleotide | | |
| | sequence described by the general formula of a − b, | | |
| | where a is any integer between 1 to 833 of SEQ ID | | |
| | NO: 336, b is an integer of 15 to 847, where both a and | | |
| | b correspond to the positions of nucleotide residues | | |
| | shown in SEQ ID NO: 336, and where b is greater than | | |
| | or equal to a + 14. | | |
| 831379 | Preferably excluded from the present invention are | R26001, R26804, R82629, R82630, H21598, H27310, H27309, H38082, H38083, | |
| | one or more polynucleotides comprising a nucleotide | H44451, H44494, H47613, R83356, R83791, R96066, R96103, H72512, H72910, | |
| | sequence described by the general formula of a − b, | H80449, H80450, H90511, H90607, N71766, N94349, W16956, W23496, W24351, | |
| | where a is any integer between 1 to 688 of SEQ ID | W46455, W46523, W48658, W70263, W73002, W76239, W92963, W92964, AA157329, | |
| | NO: 337, b is an integer of 15 to 702, where both a and | AA157426, AA458665, AA229554, AA280810, AA280936, AA490898, AA491084, | |
| | b correspond to the positions of nucleotide residues | AA493730, AA527336, AA5 34762, AA535794, F 17720, AA603439, AA568655, | |
| | shown in SEQ ID NO: 337, and where b is greater than | AA659071, AA826699, AA872867, AA876999, AA932403, AA953149, AA953343, | |
| | or equal to a + 14. | AI000023, AI017353, AI094807, N95548, C02063, C04109 | |
| 831385 | Preferably excluded from the present invention are | | |
| | one or more polynucleotides comprising a nucleotide | | |
| | sequence described by the general formula of a − b, | | |
| | where a is any integer between 1 to 861 of SEQ ID | | |
| | NO: 338, b is an integer of 15 to 875, where both a and | | |
| | b correspond to the positions of nucleotide residues | | |
| | shown in SEQ ID NO: 338, and where b is greater than | | |
| | or equal to a + 14. | | |
| 831390 | Preferably excluded from the present invention are | T53890, T54037, T81546, T81973, R20470, R21066, R45288, R46246, R45288, R46246, | |
| | one or more polynucleotides comprising a nucleotide | H3340, H17537, H30523, R85229, R85230, R94643, R94685, R94686, H52010, | |
| | sequence described by the general formula of a − b, | H52125, H71328, H71376, N25973, N28794, N30891, N36603, N41703, N62205, | |
| | where a is any integer between 1 to 1434 of SEQ ID | N63213, N76503, W45706, W44353, W52126, W74523, W79862, AA033566, | |
| | NO: 339, b is an integer of 15 to 1448, where both a | AA034468, AA099015, AA099092, AA100315, AA129588, AA167137, AA194961, | |
| | and b correspond to the positions of nucleotide | AA226935, AA226943, AA418898, AA428909, AA485083, AA485195, AA505107, | |
| | residues shown in SEQ ID NO: 339, and where b is | AA506087, AA516109, AA525370, AA617946, AA627402, AA573848, AA574063, | |
| | greater than or equal to a + 14. | AA809830, AA834509, AA837985, AA862394, AA862989, AA974789, AA988779, | |
| | | AI000171, AI094917, W24010, N88026, C20972 | |
| 831391 | Preferably excluded from the present invention are | | |
| | one or more polynucleotides comprising a nucleotide | | |
| | sequence described by the general formula of a − b, | | |
| | where a is any integer between 1 to 829 of SEQ ID | | |
| | NO: 340, b is an integer of 15 to 843, where both a and | | |
| | b correspond to the positions of nucleotide residues | | |
| | shown in SEQ ID NO: 340, and where b is greater than | | |
| | or equal to a + 14. | | |
| 831405 | Preferably excluded from the present invention are | T54632, T54714, T55384, T55812, T56220, T60613, T69578, R08164, R08219, T78003, | |
| | one or more polynucleotides comprising a nucleotide | T78164, R01577, R12676, R16414, H60551, N21984, N25878, N25887, N75352, | |
| | sequence described by the general formula of a − b, | W01648, W72541, W76166, W86984, W86811, W88909, W88788, AA022691, | |
| | where a is any integer between 1 to 1279 of SEQ ID | AA022784, AA193302, AA194256, AA235873, AA425660, AA573463, AA953249, | |
| | NO: 341, b is an integer of 15 to 1293, where both a | R29055 | |
| | and b correspond to the positions of nucleotide | | |
| | residues shown in SEQ ID NO: 341, and where b is | | |
| | greater than or equal to a + 14. | | |
| 831442 | Preferably excluded from the present invention are | | |
| | one or more polynucleotides comprising a nucleotide | | |
| | sequence described by the general formula of a − b, | | |
| | where a is any integer between 1 to 1259 of SEQ ID | | |
| | NO: 342, b is an integer of 15 to 1273, where both a | | |
| | and b correspond to the positions of nucleotide | | |
| | residues shown in SEQ ID NO: 342, and where b is | | |
| | greater than or equal to a + 14. | | |
| 831476 | Preferably excluded from the present invention are | R48303, R48405, R73778, H30456, H81254, W02773, W24831, W73089, W73194, | |
| | one or more polynucleotides comprising a nucleotide | AA034015, AA151153, AA151154, AA418429, AA424672, AA593592, AA910532, | |
| | sequence described by the general formula of a − b, | AA987246, A1001017, C02335, C04320 | |
| | where a is any integer between 1 to 1779 of SEQ ID | | |
| | NO: 343, b is an integer of 15 to 1793, where both a | | |
| | and b correspond to the positions of nucleotide | | |
| | residues shown in SEQ ID NO: 343, and where b is | | |
| | greater than or equal to a + 14. | | |
| 831488 | Preferably excluded from the present invention are | | |
| | one or more polynucleotides comprising a nucleotide | | |
| | sequence described by the general formula of a − b, | | |
| | where a is any integer between 1 to 1658 of SEQ ID | | |
| | NO: 344, b is an integer of 15 to 1672, where both a | | |
| | and b correspond to the positions of nucleotide | | |
| | residues shown in SEQ ID NO: 344, and where b is | | |
| | greater than or equal to a + 14. | | |
| 831518 | Preferably excluded from the present invention are | | |
| | one or more polynucleotides comprising a nucleotide | | |
| | sequence described by the general formula of a − b, | | |
| | where a is any integer between 1 to 2095 of SEQ ID | | |
| | NO: 345, b is an integer of 15 to 2109, where both a | | |
| | and b correspond to the positions of nucleotide | | |
| | residues shown in SEQ ID NO: 345, and where b is | | |
| | greater than or equal to a + 14. | | |
| 831519 | Preferably excluded from the present invention are | | |
| | one or more polynucleotides comprising a nucleotide | | |
| | sequence described by the general formula of a − b, | | |
| | where a is any integer between 1 to 1700 of SEQ ID | | |
| | NO: 346, b is an integer of 15 to 1714, where both a | | |
| | and b correspond to the positions of nucleotide | | |
| | residues shown in SEQ ID NO:346, and where b is | | |
| | greater than or equal to a + 14. | | |
| 831521 | Preferably excluded from the present invention are | | |
| | one or more polynucleotides comprising a nucleotide | | |
| | sequence described by the general formula of a − b, | | |
| | where a is any integer between 1 to 1658 of SEQ ID | | |
| | NO: 347, b is an integer of 15 to 1672, where both a | | |
| | and b correspond to the positions of nucleotide | | |
| | residues shown in SEQ ID NO: 347, and where b is | | |
| | greater than or equal to a + 14. | | |
| 831550 | Preferably excluded from the present invention are | | |
| | one or more polynucleotides comprising a nucleotide | | |
| | sequence described by the general formula of a − b, | | |
| | where a is any integer between 1 to 1469 of SEQ ID | | |
| | NO: 348, b is an integer of 15 to 1483, where both a | | |
| | and b correspond to the positions of nucleotide | | |
| | residues shown in SEQ ID NO: 348, and where b is | | |
| | greater than or equal to a + 14. | | |
| 831560 | Preferably excluded from the present invention are | T56438, R22852, R46063, R52365, R81781, R81879, H02958, H04256, H05743, | |
| | one or more polynucleotides comprising a nucleotide | H05849, H23235, H23349, H43210, H43260, H87699, H91571, W00708, W56717, | |
| | sequence described by the general formula of a − b, | W56762, W70251, W70252, AA026841, AA027043, AA041261, AA041495, AA043451, | |
| | where a is any integer between 1 to 1828 of SEQ ID | AA043452, AA054505, AA054366, AA055050, AA055129, AA147629, AA147667 | |
| | NO: 349, b is an integer of 15 to 1842, where both a | | |
| | and b correspond to the positions of nucleotide | | |
| | residues shown in SEQ ID NO: 349, and where b is | | |
| | greater than or equal to a + 14. | | |
| 831562 | Preferably excluded from the present invention are | | |
| | one or more polynucleotides comprising a nucleotide | | |
| | sequence described by the general formula of a − b, | | |
| | where a is any integer between 1 to 2994 of SEQ ID | | |
| | NO: 350, b is an integer of 15 to 3008, where both a | | |
| | and b correspond to the positions of nucleotide | | |
| | residues shown in SEQ ID NO: 350, and where b is | | |
| | greater than or equal to a + 14. | | |
| 831570 | Preferably excluded from the present invention are | | |
| | one or more polynucleotides comprising a nucleotide | | |
| | sequence described by the general formula of a − b, | | |
| | where a is any integer between 1 to 2742 of SEQ ID | | |
| | NO: 351, b is an integer of 15 to 2756, where both a | | |
| | and b correspond to the positions of nucleotide | | |
| | residues shown in SEQ ID NO: 351, and where b is | | |
| | greater than or equal to a + 14. | | |
| 831593 | Preferably excluded from the present invention are | | |
| | one or more polynucleotides comprising a nucleotide | | |
| | sequence described by the general formula of a − b, | | |
| | where a is any integer between 1 to 1631 of SEQ ID | | |
| | NO: 352, b is an integer of 15 to 1645, where both a | | |
| | and b correspond to the positions of nucleotide | | |
| | residues shown in SEQ ID NO: 352, and where b is | | |
| | greater than or equal to a + 14. | | |
| 831596 | Preferably excluded from the present invention are | | |
| | one or more polynucleotides comprising a nucleotide | | |
| | sequence described by the general formula of a − b, | | |
| | where a is any integer between ito 1623 of SEQ ID | | |
| | NO: 353, b is an integer of 15 to 1637, where both a | | |
| | and b correspond to the positions of nucleotide | | |
| | residues shown in SEQ ID NO: 353, and where b is | | |
| | greater than or equal to a + 14. | | |
| 831627 | Preferably excluded from the present invention are | AA147578, AA156449, AA588796, AA863066, D80116 | |
| | one or more polynucleotides comprising a nucleotide | | |
| | sequence described by the general formula of a − b, | | |
| | where a is any integer between 1 to 1105 of SEQ ID | | |
| | NO: 354, b is an integer of 15 to 1119, where both a | | |
| | and b correspond to the positions of nucleotide | | |
| | residues shown in SEQ ID NO: 354, and where b is | | |
| | greater than or equal to a + 14. | | |
| 831649 | Preferably excluded from the present invention are | R21047 | |
| | one or more polynucleotides comprising a nucleotide | | |
| | sequence described by the general formula of a − b, | | |
| | where a is any integer between 1 to 724 of SEQ ID | | |
| | NO: 355, b is an integer of 15 to 738, where both a and | | |
| | b correspond to the positions of nucleotide residues | | |
| | shown in SEQ ID NO: 355, and where b is greater than | | |
| | or equal to a + 14. | | |
| 831664 | Preferably excluded from the present invention are | R35205, H13039, R84255, W24589, W93157, AA186436, AA188774, AA227246, | |
| | one or more polynucleotides comprising a nucleotide | AA658889, AA838204, W22056, W25833, W28198, W28494, AA090436, AA089530, | |
| | sequence described by the general formula of a − b, | AA089667 | |
| | where a is any integer between 1 to 1952 of SEQ ID | | |
| | NO: 356, b is an integer of 15 to 1966, where both a | | |
| | and b correspond to the positions of nucleotide | | |
| | residues shown in SEQ ID NO: 356, and where b is | | |
| | greater than or equal to a + 14. | | |
| 831674 | Preferably excluded from the present invention are | | |
| | one or more polynucleotides comprising a nucleotide | | |
| | sequence described by the general formula of a − b, | | |
| | where a is any integer between 1 to 1548 of SEQ ID | | |
| | NO: 357, b is an integer of 15 to 1562, where both a | | |
| | and b correspond to the positions of nucleotide | | |
| | residues shown in SEQ ID NO: 357, and where b is | | |
| | greater than or equal to a + 14. | | |
| 831684 | Preferably excluded from the present invention are | T64083, R54664, R54665, W52888, W60096, W60162, AA009843, AA009870, | |
| | one or more polynucleotides comprising a nucleotide | AA236225, AA236291, AA459452, AA465675, AA554776, AA563899, AA583755, | |
| | sequence described by the general formula of a − b, | AA593849, AA596013, AA627978, AA573921, AA747840, AA828086, AA830260, | |
| | where a is any integer between 1 to 1917 of SEQ ID | AA837593, AA996154, C01662 | |
| | NO: 358, b is an integer of 15 to 1931, where both a | | |
| | and b correspond to the positions of nucleotide | | |
| | residues shown in SEQ ID NO: 358, and where b is | | |
| | greater than or equal to a + 14. | | |
| 831687 | Preferably excluded from the present invention are | T49489, R05976, R55046, N21648, N31054, N48001, AA464953, AA26224, | |
| | one or more polynucleotides comprising a nucleotide | AA430556, AA600829, AA744708, AA747361, AA976473, AI097658 | |
| | sequence described by the general formula of a − b, | | |
| | where a is any integer between 1 to 855 of SEQ ID | | |
| | NO: 359, b is an integer of 15 to 869, where both a and | | |
| | b correspond to the positions of nucleotide residues | | |
| | shown in SEQ ID NO: 359, and where b is greater than | | |
| | or equal to a + 14. | | |
| 831726 | Preferably excluded from the present invention are | | |
| | one or more polynucleotides comprising a nucleotide | | |
| | sequence described by the general formula of a − b, | | |
| | where a is any integer between 1 to 547 of SEQ ID | | |
| | NO: 360, b is an integer of 15 to 561, where both a and | | |
| | b correspond to the positions of nucleotide residues | | |
| | shown in SEQ ID NO: 360, and where b is greater than | | |
| | or equal to a + 14. | | |
| 831736 | Preferably excluded from the present invention are | T60384, T93026, T83297, R17403, R17423, R21319, H65765, N94506, W23956, | |
| | one or more polynucleotides comprising a nucleotide | W24344, W45068, W57786, W57860, W81343, AA058929, AA151788, AA151833 | |
| | sequence described by the general formula of a − b, | | |
| | where a is any integer between 1 to 1666 of SEQ ID | | |
| | NO: 361, b is an integer of 15 to 1680, where both a | | |
| | and b correspond to the positions of nucleotide | | |
| | residues shown in SEQ ID NO: 361, and where b is | | |
| | greater than or equal to a + 14. | | |
| 831762 | Preferably excluded from the present invention are | | |
| | one or more polynucleotides comprising a nucleotide | | |
| | sequence described by the general formula of a − b, | | |
| | where a is any integer between 1 to 726 of SEQ ID | | |
| | NO: 362, b is an integer of 15 to 740, where both a and | | |
| | correspond to the positions of nucleotide residues | | |
| | shown in SEQ ID NO: 362, and where b is greater than | | |
| | or equal to a + 14. | | |
| 831801 | Preferably excluded from the present invention are | T39530, T64430, R36089, H12597, H12647, H19534, H20096, H26648, H26663, | |
| | one or more polynucleotides comprising a nucleotide | W15192, W45569, W45621, AA018144, AA018145, AA018470, AA039510, AA039529, | |
| | sequence described by the general formula of a − b, | AA047549, AA047837, AA057785, AA074201, AA075686, AA079138, AA135599, | |
| | where a is any integer between 1 to 1310 of SEQ ID | AA135658, AA147502, AA147931, AA156715, AA156811, AA188215, AA186362, | |
| | NO: 363, b is an integer of 15 to 1324, where both a | AA425996, AA283917, AA514670, AA522463, AA714301, AA742700, AA872728, | |
| | and b correspond to the positions of nucleotide | AA887841, AA971644, AI015637, AI053971, AI054233, AI074507, AI084901, W28363 | |
| | residues shown in SEQ ID NO: 363, and where b is | | |
| | greater than or equal to a + 14. | | |
| 831848 | Preferably excluded from the present invention are | T77112, R13655, R19353, R19511, R24780, R35812, R36752, R38177, R43861, R44629, | |
| | one or more polynucleotides comprising a nucleotide | R45511, R43861, R45511, R44629, R71248, R71299, R82784, H00629, H01917, | |
| | sequence described by the general formula of a − b, | H04479, H45706, H45757, H94039, H94125, N30574, N57220, AA033684, AA114107, | |
| | where a is any integer between 1 to 2839 of SEQ ID | AA253260, AA461547, AA460619, AA715125, A1096588, C03714, AA092127 | |
| | NO: 364, b is an integer of 15 to 2853, where both a | | |
| | and b correspond to the positions of nucleotide | | |
| | residues shown in SEQ ID NO: 364, and where b is | | |
| | greater than or equal to a + 14. | | |
| 831861 | Preferably excluded from the present invention are | T57456, T58038, T58104, R08156, R27046, R28341, R28340, N32411, N56831, | |
| | one or more polynucleotides comprising a nucleotide | N78961, W16984, W16954, W17352, W74522, W79861, AA025882, AA025883, | |
| | sequence described by the general formula of a − b, | AA084109, AA100121, AA10006O, AA132713 | |
| | where a is any integer between 1 to 1823 of SEQ ID | | |
| | NO: 365, b is an integer of 15 to 1837, where both a | | |
| | and b correspond to the positions of nucleotide | | |
| | residues shown in SEQ ID NO: 365, and where b is | | |
| | greater than or equal to a + 14. | | |
| 831866 | Preferably excluded from the present invention are | | |
| | one or more polynucleotides comprising a nucleotide | | |
| | sequence described by the general formula of a − b, | | |
| | where a is any integer between 1 to 1809 of SEQ ID | | |
| | NO: 366, b is an integer of 15 to 1823, where both a | | |
| | and b correspond to the positions of nucleotide | | |
| | residues shown in SEQ ID NO: 366, and where b is | | |
| | greater than or equal to a + 14. | | |
| 831878 | Preferably excluded from the present invention are | | |
| | one or more polynucleotides comprising a nucleotide | | |
| | sequence described by the general formula of a − b, | | |
| | where a is any integer between 1 to 884 of SEQ ID | | |
| | NO: 367, b is an integer of 15 to 898, where both a and | | |
| | b correspond to the positions of nucleotide residues | | |
| | shown in SEQ ID NO: 367, and where b is greater than | | |
| | or equal to a + 14. | | |
| 831899 | Preferably excluded from the present invention are | AA159048, AA768390, AA806956 | |
| | one or more polynucleotides comprising a nucleotide | | |
| | sequence described by the general formula of a − b, | | |
| | where a is any integer between 1 to 1103 of SEQ ID | | |
| | NO: 368, b is an integer of 15 to 1117, where both a | | |
| | and b correspond to the positions of nucleotide | | |
| | residues shown in SEQ ID NO: 368, and where b is | | |
| | greater than or equal to a + 14. | | |
| 831913 | Preferably excluded from the present invention are | | |
| | one or more polynucleotides comprising a nucleotide | | |
| | sequence described by the general formula of a − b, | | |
| | where a is any integer between 1 to 2212 of SEQ ID | | |
| | NO: 369, b is an integer of 15 to 2226, where both a | | |
| | and b correspond to the positions of nucleotide | | |
| | residues shown in SEQ ID NO: 369, and where b is | | |
| | greater than or equal to a + 14. | | |
| 831972 | Preferably excluded from the present invention are | | |
| | one or more polynucleotides comprising a nucleotide | | |
| | sequence described by the general formula of a − b, | | |
| | where a is any integer between 1 to 3622 of SEQ ID | | |
| | NO: 370, b is an integer of 15 to 3636, where both a | | |
| | and b correspond to the positions of nucleotide | | |
| | residues shown in SEQ ID NO: 370, and where b is | | |
| | greater than or equal to a + 14. | | |
| 831985 | Preferably excluded from the present invention are | | |
| | one or more polynucleotides comprising a nucleotide | | |
| | sequence described by the general formula of a − b, | | |
| | where a is any integer between 1 to 4025 of SEQ ID | | |
| | NO: 371, b is an integer of 15 to 4039, where both a | | |
| | and b correspond to the positions of nucleotide | | |
| | residues shown in SEQ ID NO: 371, and where b is | | |
| | greater than or equal to a + 14. | | |
| 831986 | Preferably excluded from the present invention are | | |
| | one or more polynucleotides comprising a nucleotide | | |
| | sequence described by the general formula of a − b, | | |
| | where a is any integer between 1 to 1585 of SEQ ID | | |
| | NO: 372, b is an integer of 15 to 1599, where both a | | |
| | and b correspond to the positions of nucleotide | | |
| | residues shown in SEQ ID NO: 372, and where b is | | |
| | greater than or equal to a + 14. | | |
| 832010 | Preferably excluded from the present invention are | | |
| | one or more polynucleotides comprising a nucleotide | | |
| | sequence described by the general formula of a − b, | | |
| | where a is any integer between 1 to 450 of SEQ ID | | |
| | or equal to a + 14. | | |
| 832122 | Preferably excluded from the present invention are | | |
| | one or more polynucleotides comprising a nucleotide | | |
| | sequence described by the general formula of a − b, | | |
| | where a is any integer between 1 to 2551 of SEQ ID | | |
| | NO: 378, b is an integer of 15 to 2565, where both a | | |
| | and b correspond to the positions of nucleotide | | |
| | residues shown in SEQ ID NO: 378, and where b is | | |
| | greater than or equal to a + 14. | | |
| 832148 | Preferably excluded from the present invention are | T78202, R37864, R62706, R78737, R78736, H62109, N50394, N51659, N67973, | |
| | one or more polynucleotides comprising a nucleotide | N80394, W33108, W33107, AA016055, AA074831, AA075097, AA256793, AA256472, | |
| | sequence described by the general formula of a − b, | AA418825, AA418922, AA430755, AA280663, AA281049, AA467867, AA502148, | |
| | where a is any integer between 1 to 1666 of SEQ ID | H71558, AA721278, AA748880, AA809767, AA810852, AA832174, AA911263, | |
| | NO: 379, b is an integer of 15 to 1680, where both a | AA938484, AA975282, D80672, D81573, D81746, A1096900, C02375 | |
| | and b correspond to the positions of nucleotide | | |
| | residues shown in SEQ ID NO: 379, and where b is | | |
| | greater than or equal to a + 14. | | |
| 832197 | Preferably excluded from the present invention are | | |
| | one or more polynucleotides comprising a nucleotide | | |
| | sequence described by the general formula of a − b, | | |
| | where a is any integer between 1 to 1253 of SEQ ID | | |
| | NO: 380, b is an integer of 15 to 1267, where both a | | |
| | and b correspond to the positions of nucleotide | | |
| | residues shown in SEQ ID NO: 380, and where b is | | |
| | greater than or equal to a + 14. | | |
| 832237 | Preferably excluded from the present invention are | R36943, R42259, R53230, R42259, H09607, AA150724, AA831055 | |
| | one or more polynucleotides comprising a nucleotide | | |
| | sequence described by the general formula of a − b, | | |
| | where a is any integer between 1 to 1017 of SEQ ID | | |
| | NO: 381, b is an integer of 15 to 1031, where both a | | |
| | and b correspond to the positions of nucleotide | | |
| | residues shown in SEQ ID NO: 381, and where b is | | |
| | greater than or equal to a + 14. | | |
| 832246 | Preferably excluded from the present invention are | H13698, H13750, R91283, R91322, H97506, N64810, N75659, W61290, W65386, | |
| | one or more polynucleotides comprising a nucleotide | H54890, AA568261, AA830860, AA863239, AA873329, AA938701, D82264, C18047 | |
| | sequence described by the general formula of a − b, | | |
| | where a is any integer between 1 to 1583 of SEQ ID | | |
| | NO: 382, b is an integer of 15 to 1597, where both a | | |
| | and b correspond to the positions of nucleotide | | |
| | residues shown in SEQ ID NO: 382, and where b is | | |
| | greater than or equal to a + 14. | | |
| 832256 | Preferably excluded from the present invention are | | |
| | one or more polynucleotides comprising a nucleotide | | |
| | sequence described by the general formula of a − b, | | |
| | where a is any integer between 1 to 161 of SEQ ID | | |
| | NO: 383, b is an integer of 15 to 175, where both a and | | |
| | b correspond to the positions of nucleotide residues | | |
| | shown in SEQ ID NO: 383, and where b is greater than | | |
| | or equal to a + 14. | | |
| 832280 | Preferably excluded from the present invention are | H09977, H09978, R89392, R94438, H93033, H93466, H93904, N29334, N53767, | |
| | one or more polynucleotides comprising a nucleotide | N57027, N71868, N71879, N73126, W24652, AA026682, AA047124, AA127259, | |
| | sequence described by the general formula of a − b, | AA224396, AA224473, AA227220, AA236734, AA236763, AA236910, AA236919 | |
| | where a is any integer between 1 to 2157 of SEQ ID | | |
| | NO: 384, b is an integer of 15 to 2171, where both a | | |
| | and b correspond to the positions of nucleotide | | |
| | residues shown in SEQ ID NO: 384, and where b is | | |
| | greater than or equal to a + 14. | | |
| 832285 | Preferably excluded from the present invention are | R12740, R14184, R15171, R26447, R28455, R34165, R35396, R39792, R40473, | |
| | one or more polynucleotides comprising a nucleotide | R49696, R41588, R40473, R49696, R70668, R70669, R79640, R79833, H02312, | |
| | sequence described by the general formula of a − b, | H08199, H08297, R99351, H84241, H84567, H85554, N24354, N25230, N32462, | |
| | where a is any integer between 1 to 2350 of SEQ ID | N33863, N64676, N70374, N80109, W47526, W47527, W80678, W80934, W93668, | |
| | NO: 385, b is an integer of 15 to 2364, where both a | AA082195, AA223758, AA243624, AA255527, AA256711, AA262387, AA281015, | |
| | and b correspond to the positions of nucleotide | AA281094, AA281183, AA281203, AA287927, AA287991, AA505084, AA505086, | |
| | residues shown in SEQ ID NO: 385, and where b is | AA525301, AA553559, AA564243, AA582189, AA737010, AA808271, AA872481, | |
| | greater than or equal to a + 14. | AA937541, AI015987, C01015, C20842 | |
| 832294 | Preferably excluded from the present invention are | | |
| | one or more polynucleotides comprising a nucleotide | | |
| | sequence described by the general formula of a − b, | | |
| | where a is any integer between 1 to 2850 of SEQ ID | | |
| | NO: 386, b is an integer of 15 to 2864, where both a | | |
| 832326 | Preferably excluded from the present invention are | | |
| | where a is any integer between 1 to 2669 of SEQ ID | | |
| | NO: 387, b is an integer of 15 to 2683, where both a | | |
| | and b correspond to the positions of nucleotide | | |
| | residues shown in SEQ ID NO: 387, and where b is | | |
| | greater than or equal to a + 14. | | |
| 832333 | Preferably excluded from the present invention are | | |
| | one or more polynucleotides comprising a nucleotide | | |
| | sequence described by the general formula of a − b, | | |
| | where a is any integer between 1 to 1432 of SEQ ID | | |
| | NO: 388, b is an integer of 15 to 1446, where both a | | |
| | and b correspond to the positions of nucleotide | | |
| | residues shown in SEQ ID NO: 388, and where b is | | |
| | greater than or equal to a + 14. | | |
| 832346 | Preferably excluded from the present invention are | T88928, R12446, R37113, R42462, H15692, H18859, N3664, AA132220, AA224337, | |
| | one or more polynucleotides comprising a nucleotide | AA460720, AA492479 | |
| | sequence described by the general formula of a − b, | | |
| | where a is any integer between 1 to 709 of SEQ ID | | |
| | NO: 389, b is an integer of 15 to 723, where both a and | | |
| | b correspond to the positions of nucleotide residues | | |
| | shown in SEQ ID NO: 389, and where b is greater than | | |
| | or equal to a + 14. | | |
| 832370 | Preferably excluded from the present invention are | | |
| | one or more polynucleotides comprising a nucleotide | | |
| | sequence described by the general formula of a − b, | | |
| | where a is any integer between 1 to 1032 of SEQ ID | | |
| | NO: 390, b is an integer of 15 to 1046, where both a | | |
| | and b correspond to the positions of nucleotide | | |
| | residues shown in SEQ ID NO: 390, and where b is | | |
| | greater than or equal to a + 14. | | |
| 832381 | Preferably excluded from the present invention are | | |
| | one or more polynucleotides comprising a nucleotide | | |
| | sequence described by the general formula of a − b, | | |
| | where a is any integer between 1 to 685 of SEQ ID | | |
| | NO: 391, b is an integer of 15 to 699, where both a and | | |
| | b correspond to the positions of nucleotide residues | | |
| | shown in SEQ ID NO: 391, and where b is greater than | | |
| | or equal to a + 14. | | |
| 832394 | Preferably excluded from the present invention are | | |
| | one or more polynucleotides comprising a nucleotide | | |
| | sequence described by the general formula of a − b, | | |
| | where a is any integer between 1 to 1531 of SEQ ID | | |
| | NO: 392, b is an integer of 15 to 1545, where both a | | |
| | and b correspond to the positions of nucleotide | | |
| | residues shown in SEQ ID NO: 392, and where b is | | |
| | greater than or equal to a + 14. | | |
| 832454 | Preferably excluded from the present invention are | T57094, T58711, T68990, T71879, R92183, H93778, N63977, N80768, AA034382, | |
| | one or more polynucleotides comprising a nucleotide | AA034383, AA057664, AA235744, AA425865, AA524693, AA551804, AA523604, | |
| | sequence described by the general formula of a − b, | AA614639, AA74016, AA872373, AA938571, AA947337, R28997, AA640968, | |
| | where a is any integer between 1 to 735 of SEQ ID | C21135 | |
| | NO: 393, b is an integer of 15 to 749, where both a and | | |
| | b correspond to the positions of nucleotide residues | | |
| | shown in SEQ ID NO: 393, and where b is greater than | | |
| or equal to a + 14. | | | |
| 832465 | Preferably excluded from the present invention are | R36004, R36378, H71881, H96279, N50049, N63692, W74426, W79180, W87805, | |
| | one or more polynucleotides comprising a nucleotide | AA421015, AA527679, AA833773, AA987375, F19351, AA642491, C14893, C14937 | |
| | sequence described by the general formula of a − b, | | |
| | where a is any integer between 1 to 597 of SEQ ID | | |
| | NO: 394, b is an integer of 15 to 611, where both a and | | |
| | b correspond to the positions of nucleotide residues | | |
| | shown in SEQ ID NO: 394, and where b is greater than | | |
| | or equal to a + 14. | | |
| 832475 | Preferably excluded from the present invention are | | |
| | one or more polynucleotides comprising a nucleotide | | |
| | sequence described by the general formula of a − b, | | |
| | where a is any integer between 1 to 1842 of SEQ ID | | |
| | NO: 395, b is an integer of 15 to 1856, where both a | | |
| | and b correspond to the positions of nucleotide | | |
| | residues shown in SEQ ID NO: 395, and where b is | | |
| | greater than or equal to a + 14. | | |
| 832495 | Preferably excluded from the present invention are | | |
| | one or more polynucleotides comprising a nucleotide | | |
| | sequence described by the general formula of a − b, | | |
| | where a is any integer between 1 to 2637 of SEQ ID | | |
| | NO: 396, b is an integer of 15 to 2651, where both a | | |
| | and b correspond to the positions of nucleotide | | |
| | residues shown in SEQ ID NO: 396, and where b is | | |
| | greater than or equal to a + 14. | | |
| 832498 | Preferably excluded from the present invention are | T67126, T67127, R13516, R20638, H64071, N22361, N25516, N39506, N75609, | |
| | one or more polynucleotides comprising a nucleotide | N78204, W40313, W45344, AA074739, AA074803, AA143509, AA523999, AA552542, | |
| | sequence described by the general formula of a − b, | A554032, N20483, AA588804, AA617733, AA577150, AA577309, AA579423, | |
| | where a is any integer between 1 to 2493 of SEQ ID | AA740813, AA835721, AA836640, AA909766, AA936979, AA947310, N26815, | |
| | NO: 397, b is an integer of 15 to 2507, where both a | AI085484, D78707, W67520, W68152 | |
| | and b correspond to the positions of nucleotide | | |
| | residues shown in SEQ ID NO: 397, and where b is | | |
| | greater than or equal to a + 14. | | |
| 832501 | Preferably excluded from the present invention are | | |
| | one or more polynucleotides comprising a nucleotide | | |
| | sequence described by the general formula of a − b, | | |
| | where a is any integer between 1 to 1259 of SEQ ID | | |
| | NO: 398, b is an integer of 15 to 1273, where both a | | |
| | and b correspond to the positions of nucleotide | | |
| | residues shown in SEQ ID NO: 398, and where b is | | |
| | greater than or equal to a + 14. | | |
| 832505 | Preferably excluded from the present invention are | T50501, T50636, T92136, R52390, R59648, H06170, H28886, H28885, R96577, | |
| | one or more polynucleotides comprising a nucleotide | R96600, H84171, H94122, H98228, N36866, N36872, N46136, N46142, N63589, | |
| | sequence described by the general formula of a − b, | N66323, W48779, W49798, AA029033, AA054487, AA058524, AA084466, AA086177, | |
| | where a is any integer between 1 to 3760 of SEQ ID | AA098967, AA099485, AA100345, AA147008, AA147009, AA146910, AA146909, | |
| | NO: 399, b is an integer of 15 to 3774, where both a | AA160346, AA159865, AA192832, AA203513, AA252521, AA252553, AA463513, | |
| | and b correspond to the positions of nucleotide | AA463570, AA421250, AA425704, AA427774, AA278328, AA278999, AA280712, | |
| | residues shown in SEQ ID NO: 399, and where b is | AA281733, AA281871, AA282407, AA282626, AA283639, AA542810, AA557893, | |
| | greater than or equal to a + 14. | AA568486, AA569759, AA577522, AA659517, AA659737, AA664537, AA713950, | |
| | | AA805488, AA835999, AA876619, AA931568, AA935758, AA946722, AI000603, | |
| | | D82640 | |
| 832539 | Preferably excluded from the present invention are | H72563, AA16O114, AA159654, AA161261, AA165097, AA223618, AA243203 | |
| | one or more polynucleotides comprising a nucleotide | | |
| | sequence described by the general formula of a − b, | | |
| | where a is any integer between 1 to 1508 of SEQ ID | | |
| | NO: 400, b is an integer of 15 to 1522, where both a | | |
| | and b correspond to the positions of nucleotide | | |
| | residues shown in SEQ ID NO: 400, and where b is | | |
| | greater than or equal to a + 14. | | |
| 832554 | Preferably excluded from the present invention are | | |
| | one or more polynucleotides comprising a nucleotide | | |
| | sequence described by the general formula of a − b, | | |
| | where a is any integer between 1 to 1356 of SEQ ID | | |
| | NO: 401, b is an integer of 15 to 1370, where both a | | |
| | and b correspond to the positions of nucleotide | | |
| | residues shown in SEQ ID NO: 401, and where b is | | |
| | greater than or equal to a + 14. | | |
| 832569 | Preferably excluded from the present invention are | | |
| | one or more polynucleotides comprising a nucleotide | | |
| | sequence described by the general formula of a − b, | | |
| | where a is any integer between 1 to 1398 of SEQ ID | | |
| | NO: 402, b is an integer of 15 to 1412, where both a | | |
| | and b correspond to the positions of nucleotide | | |
| | residues shown in SEQ ID NO: 402, and where b is | | |
| | greater than or equal to a + 14. | | |
| 832578 | Preferably excluded from the present invention are | R09545, R09658, R09967, R11471, R16714, R16910, R16965, R19372, R80788, | |
| | one or more polynucleotides comprising a nucleotide | R80988, H28725, H63085, H63169, H75499, H75500, N33554, N41536, N52961, | |
| | sequence described by the general formula of a − b, | N52966, N74070, W01039, W57770, W57843, W60109, W91978, W92107, AA001984, | |
| | where a is any integer between 1 to 1736 of SEQ ID | AA004653, AA027155, AA418427, AA281395, AA532870, AA564737, AA588889, | |
| | NO: 403, b is an integer of 15 to 1750, where both a | AA631841, AA639548, AA765363, AA877896, AA887900, AA974026, AI057270, | |
| | and b correspond to the positions of nucleotide | AI084214, AI094490, AI096750, AI097632, AI096745 | |
| | residues shown in SEQ ID NO: 403, and where b is | | |
| | greater than or equal to a + 14. | | |
| 832615 | Preferably excluded from the present invention are | | |
| | one or more polynucleotides comprising a nucleotide | | |
| | sequence described by the general formula of a − b, | | |
| | where a is any integer between 1 to 1325 of SEQ ID | | |
| | NO: 404, b is an integer of 15 to 1339, where both a | | |
| | and b correspond to the positions of nucleotide | | |
| | residues shown in SEQ ID NO: 404, and where b is | | |
| | greater than or equal to a + 14. | | |
| 832620 | Preferably excluded from the present invention are | | |
| | one or more polynucleotides comprising a nucleotide | | |
| | sequence described by the general formula of a − b, | | |
| | where a is any integer between 1 to 468 of SEQ ID | | |
| | NO: 405, b is an integer of 15 to 482, where both a and | | |
| | b correspond to the positions of nucleotide residues | | |
| | shown in SEQ ID NO: 405, and where b is greater than | | |
| | or equal to a+ 14. | | |
| 832632 | Preferably excluded from the present invention are | | |
| | one or more polynucleotides comprising a nucleotide | | |
| | sequence described by the general formula of a − b, | | |
| | where a is any integer between 1 to 1399 of SEQ ID | | |
| | NO: 406, b is an integer of 15 to 1413, where both a | | |
| | and b correspond to the positions of nucleotide | | |
| | residues shown in SEQ ID NO: 406, and where b is | | |
| | greater than or equal to a + 14. | | |
| 832633 | Preferably excluded from the present invention are | R69173, AA053085, AA053597, AA427705, AA730380, AA865757, AA911497, | |
| | one or more polynucleotides comprising a nucleotide | AI083906 | |
| | sequence described by the general formula of a − b, | | |
| | where a is any integer between 1 to 1679 of SEQ ID | | |
| | NO: 407, b is an integer of 15 to 1693, where both a | | |
| | and b correspond to the positions of nucleotide | | |
| | residues shown in SEQ ID NO: 407, and where b is | | |
| | greater than or equal to a + 14. | | |
| 833483 | Preferably excluded from the present invention are | | |
| | one or more polynucleotides comprising a nucleotide | | |
| | sequence described by the general formula of a − b, | | |
| | where a is any integer between 1 to 1328 of SEQ ID | | |
| | NO: 408, b is an integer of 15 to 1342, where both a | | |
| | and b correspond to the positions of nucleotide | | |
| | residues shown in SEQ ID NO: 408, and where b is | | |
| | greater than or equal to a + 14. | | |
| 834574 | Preferably excluded from the present invention are | | |
| | one or more polynucleotides comprising a nucleotide | | |
| | sequence described by the general formula of a − b, | | |
| | where a is any integer between 1 to 2403 of SEQ ID | | |
| | NO: 409, b is an integer of 15 to 2417, where both a | | |
| | and b correspond to the positions of nucleotide | | |
| | residues shown in SEQ ID NO: 409, and where b is | | |
| | greater than or equal to a + 14. | | |
| 834859 | Preferably excluded from the present invention are | | |
| | one or more polynucleotides comprising a nucleotide | | |
| | sequence described by the general formula of a − b, | | |
| | where a is any integer between 1 to 1387 of SEQ ID | | |
| | NO: 410, b is an integer of 15 to 1401, where both a | | |
| | and b correspond to the positions of nucleotide | | |
| | residues shown in SEQ ID NO: 410, and where b is | | |
| | greater than or equal to a + 14. | | |
| 834861 | Preferably excluded from the present invention are | | |
| | one or more polynucleotides comprising a nucleotide | | |
| | sequence described by the general formula of a − b, | | |
| | where a is any integer between 1 to 3002 of SEQ ID | | |
| | NO: 411, b is an integer of 15 to 3016, where both a | | |
| | and b correspond to the positions of nucleotide | | |
| | residues shown in SEQ ID NO: 411, and where b is | | |
| | greater than or equal to a + 14. | | |
| 834890 | Preferably excluded from the present invention are | T40255, T40256, T40770, T40778, T40803, T41118, T94280, T94627, R13201, | |
| | one or more polynucleotides comprising a nucleotide 32389, R53769, 1128669, H39502, H42532, 1142533, R82957, R85205, R85206, | | |
| | sequence described by the general formula of a − b, | R88749, R90730, R90754, R91006, R92221, H56130, H56210, H58500, H57659, | |
| | where a is any integer between 1 to 944 of SEQ ID | H69479, H69882, N22547, N31579, N42592, N45537, N48687, N56654, N58050, | |
| | NO: 412, b is an integer of 15 to 958, where both a and | N69059, N73728, N80748, N92927, N94545, W20471, W30838, W52039, W60171, | |
| | b correspond to the positions of nucleotide residues | W68292, W93085, W93140, N91563, AA010850, AA011289, AA054592, AA054780, | |
| | shown in SEQ ID NO: 412, and where b is greater than | AA081135, AA081214, AA081655, AA081936, AA082127, AA082262, AA088665, | |
| | or equal to a + 14. | AA088804, AA102560, AA100239, AA114237, AA115714, AA115715, AA127304, | |
| | | AA127303, AA147789, AA148021, AA149821, AA152050, AA160878, AA169126, | |
| | | AA171659, AA172131, AA172285, AA194597, AA243129, AA419357, AA425135, | |
| | | AA426203, AA244212, AA505963, AA508221, AA527434, AA527878, AA565036, | |
| | | F17736, AA582605, AA582728, AA583851, AA586421, AA601920, AA570580, | |
| | | AA574367, AA577515, AA577538, AA565998, AA657417, AA659655, AA662658, | |
| | | AA665113, AA714991, AA770684, AA808865, AA826971, AA838507, AA876809, | |
| | | AA877842, AA878025, AA886042, AA886643, AA877950, AA937751, AA948428, | |
| | | AA947036, AA973473, AA983150, AA989361, A1082367, D78922, D82096, N83321, | |
| | | C04115, R29685, C17110, C18023, C18068, AA093539, AA094947, AA151399, | |
| | | AA654145, AA654136 | |
| 835079 | Preferably excluded from the present invention are | N25566, W00985, AA081340, AA152231, AA164282, AA171619, AA187113, | |
| | one or more polynucleotides comprising a nucleotide | AI073932 | |
| | sequence described by the general formula of a − b, | | |
| | where a is any integer between 1 to 486 of SEQ ID | | |
| | NO: 413, b is an integer of 15 to 500, where both a and | | |
| | b correspond to the positions of nucleotide residues | | |
| | shown in SEQ ID NO: 413, and where b is greater than | | |
| | or equal to a + 14. | | |
| 835554 | Preferably excluded from the present invention are | | |
| | one or more polynucleotides comprising a nucleotide | | |
| | sequence described by the general formula of a − b, | | |
| | where a is any integer between 1 to 3383 of SEQ ID | | |
| | NO: 414, b is an integer of 15 to 3397, where both a | | |
| | and b correspond to the positions of nucleotide | | |
| | residues shown in SEQ ID NO: 414, and where b is | | |
| | greater than or equal to a + 14. | | |
| 835560 | Preferably excluded from the present invention are | | |
| | one or more polynucleotides comprising a nucleotide | | |
| | sequence described by the general formula of a − b, | | |
| | where a is any integer between 1 to 2866 of SEQ ID | | |
| | NO: 415, b is an integer of 15 to 2880, where both a | | |
| | and b correspond to the positions of nucleotide | | |
| | residues shown in SEQ ID NO: 415, and where b is | | |
| | greater than or equal to a + 14. | | |
| 835723 | Preferably excluded from the present invention are | T71562, R11480, R19383, R25309, R46659, R48802, R48913, R50038, R50376, R54963, | |
| | one or more polynucleotides comprising a nucleotide | R46659, R70030, R70077, R70161, R71380, R72303, R72352, R72772, R72773, | |
| | sequence described by the general formula of a − b, | R73386, R73387, H15775, H15776, H25239, H27204, H30499, H42026, H42613, | |
| | where a is any integer between 1 to 1602 of SEQ ID | H43207, H43254, H44314, H44936, H44975, R98394, R98395, R99071, R99271, | |
| | NO: 416, b is an integer of 15 to 1616, where both a | H58902, H58903, H73590, H73436, H75566, H80599, N40440, N48475, N59703, | |
| | and b correspond to the positions of nucleotide | AA515035, AA515043, AA515450, AA515650, AA515746, AA551788, AA551943, | |
| | residues shown in SEQ ID NO: 416, and where b is | AA554602, AA557281, AA581549, AA581554, AA587399, AA593890, AA593997, | |
| | greater than or equal to a + 14. | AA593998, AA568878, AA568962, AA622458, AA7 14206, AA728962, AA737738, | |
| | | AA738036, AA738486, AA847538, AA865069, AA872029, AA886612, AA903381, | |
| | | AA916458, AA916464, AA922563, AA928617, AA928314, AA934581, AA973769, | |
| | | AA973767, AA983480, AA991199, AA994932, AA995182, AA999704, AI028371, | |
| | | AA643041 | |
| 835791 | Preferably excluded from the present invention are | | |
| | one or more polynucleotides comprising a nucleotide | | |
| | sequence described by the general formula of a − b, | | |
| | where a is any integer between 1 to 1801 of SEQ ID | | |
| | NO: 417, his an integer of 15 to 1815, where both a | | |
| | and b correspond to the positions of nucleotide | | |
| | residues shown in SEQ ID NO: 417, and where b is | | |
| | greater than or equal to a + 14. | | |
| 835817 | Preferably excluded from the present invention are | | |
| | one or more polynucleotides comprising a nucleotide | | |
| | sequence described by the general formula of a − b, | | |
| | where a is any integer between 1 to 1952 of SEQ ID | | |
| | NO: 418, b is an integer of 15 to 1966, where both a | | |
| | and b correspond to the positions of nucleotide | | |
| | residues shown in SEQ ID NO: 418, and where b is | | |
| | greater than or equal to a + 14. | | |
| 835840 | Preferably excluded from the present invention are | T66583, R15957, R22860, R62339, R62341, R62856, AA210836, AA214633, | |
| | one or more polynucleotides comprising a nucleotide | AA256340, AA732582, AA740735 | |
| | sequence described by the general formula of a − b, | | |
| | where a is any integer between 1 to 2838 of SEQ ID | | |
| | NO: 419, b is an integer of 15 to 2852, where both a | | |
| | and b correspond to the positions of nucleotide | | |
| | residues shown in SEQ ID NO: 419, and where b is | | |
| | greater than or equal to a + 14. | | |
| 836048 | Preferably excluded from the present invention are | | |
| | one or more polynucleotides comprising a nucleotide | | |
| | sequence described by the general formula of a − b, | | |
| | where a is any integer between 1 to 2691 of SEQ ID | | |
| | NO: 420, b is an integer of 15 to 2705, where both a | | |
| | and b correspond to the positions of nucleotide | | |
| | residues shown in SEQ ID NO: 420, and where b is | | |
| | greater than or equal to a + 14. | | |
| 836898 | Preferably excluded from the present invention are | | |
| | one or more polynucleotides comprising a nucleotide | | |
| | sequence described by the general formula of a − b, | | |
| | where a is any integer between ito 1887 of SEQ ID | | |
| | NO: 421, b is an integer of 15 to 1901, where both a | | |
| | and b correspond to the positions of nucleotide | | |
| | residues shown in SEQ ID NO: 421, and where b is | | |
| | greater than or equal to a + 14. | | |
| 836927 | Preferably excluded from the present invention are | | |
| | one or more polynucleotides comprising a nucleotide | | |
| | sequence described by the general formula of a − b, | | |
| | where a is any integer between 1 to 2463 of SEQ ID | | |
| | NO: 422, b is an integer of 15 to 2477, where both a | | |
| | and b correspond to the positions of nucleotide | | |
| | residues shown in SEQ ID NO: 422, and where b is | | |
| | greater than or equal to a + 14. | | |
| 837344 | Preferably excluded from the present invention are | | |
| | one or more polynucleotides comprising a nucleotide | | |
| | sequence described by the general formula of a − b, | | |
| | where a is any integer between 1 to 763 of SEQ ID | | |
| | NO: 423, b is an integer of 15 to 777, where both a and | | |
| | b correspond to the positions of nucleotide residues | | |
| | shown in SEQ ID NO: 423, and where b is greater than | | |
| | or equal to a + 14. | | |
| 837789 | Preferably excluded from the present invention are | | |
| | one or more polynucleotides comprising a nucleotide | | |
| | sequence described by the general formula of a − b, | | |
| | where a is any integer between 1 to 1635 of SEQ ID | | |
| | NO: 424, b is an integer of 15 to 1649, where both a | | |
| | and b correspond to the positions of nucleotide | | |
| | residues shown in SEQ ID NO: 424, and where b is | | |
| | greater than or equal to a + 14. | | |
| 838549 | Preferably excluded from the present invention are | | |
| | one or more polynucleotides comprising a nucleotide | | |
| | sequence described by the general formula of a − b, | | |
| | where a is any integer between 1 to 1594 of SEQ ID | | |
| | NO: 425, b is an integer of 15 to 1608, where both a | | |
| | and b correspond to the positions of nucleotide | | |
| | residues shown in SEQ ID NO: 425, and where b is | | |
| | greater than or equal to a + 14. | | |
| 838754 | Preferably excluded from the present invention are | | |
| | one or more polynucleotides comprising a nucleotide | | |
| | sequence described by the general formula of a − b, | | |
| | where a is any integer between 1 to 1780 of SEQ ID | | |
| | NO: 426, b is an integer of 15 to 1794, where both a | | |
| | and b correspond to the positions of nucleotide | | |
| | residues shown in SEQ ID NO: 426, and where b is | | |
| | greater than or equal to a + 14. | | |
| 838768 | Preferably excluded from the present invention are | | |
| | one or more polynucleotides comprising a nucleotide | | |
| | sequence described by the general formula of a − b, | | |
| | where a is any integer between 1 to 756 of SEQ ID | | |
| | NO: 427, b is an integer of 15 to 770, where both a and | | |
| | b correspond to the positions of nucleotide residues | | |
| | shown in SEQ ID NO: 427, and where b is greater than | | |
| | or equal to a + 14. | | |
| 839486 | Preferably excluded from the present invention are | | |
| | one or more polynucleotides comprising a nucleotide | | |
| | sequence described by the general formula of a − b, | | |
| | where a is any integer between 1 to 498 of SEQ ID | | |
| | NO: 428, b is an integer of 15 to 512, where both a and | | |
| | b correspond to the positions of nucleotide residues | | |
| | shown in SEQ ID NO: 428, and where b is greater than | | |
| | or equal to a + 14. | | |
| 839561 | Preferably excluded from the present invention are | R61634, AA135004, AA159213 | |
| | one or more polynucleotides comprising a nucleotide | | |
| | sequence described by the general formula of a − b, | | |
| | where a is any integer between 1 to 1456 of SEQ ID | | |
| | NO: 429, b is an integer of 15 to 1470, where both a | | |
| | and b correspond to the positions of nucleotide | | |
| | residues shown in SEQ ID NO: 429, and where b is | | |
| | greater than or equal to a + 14. | | |
| 839816 | Preferably excluded from the present invention are | | |
| | one or more polynucleotides comprising a nucleotide | | |
| | sequence described by the general formula of a − b, | | |
| | where a is any integer between 1 to 420 of SEQ ID | | |
| | NO: 430, b is an integer of 15 to 434, where both a and | | |
| | b correspond to the positions of nucleotide residues | | |
| | shown in SEQ ID NO: 430, and where b is greater than | | |
| | or equal to a + 14. | | |
| 840068 | Preferably excluded from the present invention are | | |
| | one or more polynucleotides comprising a nucleotide | | |
| | sequence described by the general formula of a − b, | | |
| | where a is any integer between 1 to 1809 of SEQ ID | | |
| | NO: 431, b is an integer of 15 to 1823, where both a | | |
| | and b correspond to the positions of nucleotide | | |
| | residues shown in SEQ ID NO: 431, and where b is | | |
| | greater than or equal to a + 14. | | |
| 840279 | Preferably excluded from the present invention are | | |
| | one or more polynucleotides comprising a nucleotide | | |
| | sequence described by the general formula of a − b, | | |
| | where a is any integer between 1 to 3377 of SEQ ID | | |
| | NO: 432, b is an integer of 15 to 3391, where both a | | |
| | and b correspond to the positions of nucleotide | | |
| | residues shown in SEQ ID NO: 432, and where b is | | |
| | greater than or equal to a + 14. | | |
| 840489 | Preferably excluded from the present invention are | | |
| | one or more polynucleotides comprising a nucleotide | | |
| | sequence described by the general formula of a − b, | | |
| | where a is any integer between 1 to 2539 of SEQ ID | | |
| | NO: 433, b is an integer of 15 to 2553, where both a | | |
| | and b correspond to the positions of nucleotide | | |
| | residues shown in SEQ ID NO: 433, and where b is | | |
| | greater than or equal to a + 14. | | |
| 840538 | Preferably excluded from the present invention are | T47551, T47552, T64522, T65947, R70190, H97064, N25641, N34240, N48063, | |
| | one or more polynucleotides comprising a nucleotide | N53261, N67904, N92702, N98774, W16899, W20316, W31028, W40137, W45371, | |
| | sequence described by the general formula of a − b, | W48722, W48577, W68670, W68773, W74242, AA033573, AA033574, AA063270, | |
| | where a is any integer between 1 to 2518 of SEQ ID | AA063271, AA065213, AA064894, AA082200, AA083707, AA085441, AA085694, | |
| | NO: 434, b is an integer of 15 to 2532, where both a | AA088302, AA088303, AA099844, AA099984, AA102604, AA111894, AA112981, | |
| | and b correspond to the positions of nucleotide | AA115039, AA115800, AA115799, AA122221, AA126905, AA126955, AA127109, | |
| | residues shown in SEQ ID NO: 434, and where b is | AA127548, AA127549, AA128933, AA129152, AA129743, AA133290, AA135251, | |
| | greater than or equal to a + 14. | AA151963, AA156321, AA156382, AA160182, AA165104, AA164688, AA173757, | |
| | | AA180038, AA182644, AA190866, AA190959, AA191561, AA191637, AA197348, | |
| | | AA195895, AA258593, AA258622, AA262173, AA464978, AA465047, AA417938, | |
| | | AA418116, AA292727, AA523585, AA525020, AA548516, AA551816, AA554642, | |
| | | AA581720, AA568802, AA579801, AA738216, AA832441, AA903391, AA938688, | |
| | | AA977201, AA987552, AI095102, AI084149, W27768, C05889, C06263, AA089556, | |
| | | AA652586, AA213999, AA213977, AA219123, AA219290, AA435695, D12383, | |
| | | D12389, AA451677, AA453222, AA485641, AA485768, AA488670, AA485947, | |
| | | AA486053, AA486197, AA489511, AA489512, AA489558, AA491452, AA489876, | |
| | | AA600130, AA608644, AA620481, AA664307, AA629754, AA629909, AA677148, | |
| | | AA722910, AA772440, AA773550, AI038219, AI075755, AI081932, AI084706, | |
| | | T10852, T24678, F00208, F00897 | |
| 840545 | Preferably excluded from the present invention are | | |
| | one or more polynucleotides comprising a nucleotide | | |
| | sequence described by the general formula of a − b, | | |
| | where a is any integer between 1 to 1808 of SEQ ID | | |
| | NO: 435, b is an integer of 15 to 1822, where both a | | |
| | and b correspond to the positions of nucleotide | | |
| | residues shown in SEQ ID NO: 435, and where b is | | |
| | greater than or equal to a + 14. | | |
| 840549 | Preferably excluded from the present invention are | R10733, T86298, R55182, R55183, H00476, H00530, H25856, H25909, H25910, | |
| | one or more polynucleotides comprising a nucleotide | N50923, W84600, W84452, AA227897, D78774, AA486440, AA629249 | |
| | sequence described by the general formula of a − b, | | |
| | where a is any integer between 1 to 1016 of SEQ ID | | |
| | NO: 436, b is an integer of 15 to 1030, where both a | | |
| | and b correspond to the positions of nucleotide | | |
| | residues shown in SEQ ID NO: 436, and where b is | | |
| | greater than or equal to a + 14. | | |
| 840551 | Preferably excluded from the present invention are | | |
| | one or more polynucleotides comprising a nucleotide | | |
| | sequence described by the general formula of a − b, | | |
| | where a is any integer between 1 to 1618 of SEQ ID | | |
| | NO: 437, b is an integer of 15 to 1632, where both a | | |
| | and b correspond to the positions of nucleotide | | |
| | residues shown in SEQ ID NO: 437, and where b is | | |
| | greater than or equal to a + 14. | | |
| 840557 | Preferably excluded from the present invention are | | |
| | one or more polynucleotides comprising a nucleotide | | |
| | sequence described by the general formula of a − b, | | |
| | where a is any integer between 1 to 1002 of SEQ ID | | |
| | NO: 438, b is an integer of 15 to 1016, where both a | | |
| | and b correspond to the positions of nucleotide | | |
| | residues shown in SEQ ID NO: 438, and where b is | | |
| | greater than or equal to a + 14. | | |
| 840561 | Preferably excluded from the present invention are | | |
| | one or more polynucleotides comprising a nucleotide | | |
| | sequence described by the general formula of a − b, | | |
| | where a is any integer between 1 to 580 of SEQ ID | | |
| | NO: 439, b is an integer of 15 to 594, where both a and | | |
| | b correspond to the positions of nucleotide residues | | |
| | shown in SEQ ID NO: 439, and where b is greater than | | |
| | or equal to a + 14. | | |
| 840562 | Preferably excluded from the present invention are | R08937, R09046, R14796, R18307, R31150, R42283, R51828, R54224, R42283, | |
| | one or more polynucleotides comprising a nucleotide | R72104, R72156, R73118, R73171, R73943, H25904, 1127191, H27192, H30471, | |
| | sequence described by the general formula of a − b, | H72478, H72879, H88214, H98231, W45061, W45071, W49842, W67423, W67424, | |
| | where a is any integer between 1 to 1566 of SEQ ID | W93880, W94151, AA023007, AA022473, AA032224, AA032282, AA034411, | |
| | NO: 440, b is an integer of 15 to 1580, where both a | AA035691, AA040428, AA046861, AA046994, AA046313, AA046139, AA053780, | |
| | and b correspond to the positions of nucleotide | AA101657, AA101658, AA167298, AA227543, AA227684, AA458877, AA459067, | |
| | residues shown in SEQ ID NO: 440, and where b is | AA463656, AA464047, AA464754, AA225370, AA225425, AA225400, AA558796, | |
| | greater than or equal to a + 14. | AA582089, AA565830, AA713907, AA864510, AA936117, C01002, N86320, C04277, | |
| | | AA652714, AA402391, AA402565, AA479073, AA621791, AA670200, AA456544, | |
| | | AA676732, AA707089, AI014599, AI022852, AI023739, AI091873, AI094288, Z39517, | |
| | | Z43438 | |
| 840564 | Preferably excluded from the present invention are | | |
| | one or more polynucleotides comprising a nucleotide | | |
| | sequence described by the general formula of a − b, | | |
| | where a is any integer between 1 to 1068 of SEQ ID | | |
| | NO: 441, b is an integer of 15 to 1082, where both a | | |
| | and b correspond to the positions of nucleotide | | |
| | residues shown in SEQ ID NO: 441, and where b is | | |
| | greater than or equal to a + 14. | | |
| 840572 | Preferably excluded from the present invention are | T87514, T87515, H84879, AA001503, AA506411, AA508167, AA715396, AA931268, | |
| | one or more polynucleotides comprising a nucleotide | AA292666, AA478036, AA478193, AA478194, AA707886, AA724969, AA725050, | |
| | sequence described by the general formula of a − b, | AA779127, AA843885 | |
| | where a is any integer between 1 to 1227 of SEQ ID | | |
| | NO: 442, b is an integer of 15 to 1241, where both a | | |
| | and b correspond to the positions of nucleotide | | |
| | residues shown in SEQ ID NO: 442, and where b is | | |
| | greater than or equal to a + 14. | | |
| 840600 | Preferably excluded from the present invention are | R38172, AA226748, AA484320, AA831852 | |
| | one or more polynucleotides comprising a nucleotide | | |
| | sequence described by the general formula of a − b, | | |
| | where a is any integer between 1 to 954 of SEQ ID | | |
| | NO: 443, b is an integer of 15 to 968, where both a and | | |
| | b correspond to the positions of nucleotide residues | | |
| | shown in SEQ ID NO: 443, and where b is greater than | | |
| | or equal to a + 14. | | |
| 840604 | Preferably excluded from the present invention are | | |
| | one or more polynucleotides comprising a nucleotide | | |
| | sequence described by the general formula of a − b, | | |
| | where a is any integer between 1 to 1346 of SEQ ID | | |
| | NO: 444, b is an integer of 15 to 1360, where both a | | |
| | and b correspond to the positions of nucleotide | | |
| | residues shown in SEQ ID NO: 444, and where b is | | |
| | greater than or equal to a + 14. | | |
| 840608 | Preferably excluded from the present invention are | | |
| | one or more polynucleotides comprising a nucleotide | | |
| | sequence described by the general formula of a − b, | | |
| | where a is any integer between 1 to 1821 of SEQ ID | | |
| | NO: 445, b is an integer of 15 to 1835, where both a | | |
| | and b correspond to the positions of nucleotide | | |
| | residues shown in SEQ ID NO: 445, and where b is | | |
| | greater than or equal to a + 14. | | |
| 840620 | Preferably excluded from the present invention are | R17303, R41982, R41982, H43756, N62762, AA053677, AA053697, AA084224, | |
| | one or more polynucleotides comprising a nucleotide | AA084019, AA084952, AA419123, AA419160, AA426014, AA425077, AA427847, | |
| | sequence described by the general formula of a − b, | AA524035, AA565019, AA632254, AA745726, AA835832, AA931712, AA932520, | |
| | where a is any integer between 1 to 1341 of SEQ ID | AA937139, AA961716, AA995607, AA453838, AA455030, AA476981, AA479615, | |
| | NO: 446, b is an integer of 15 to 1355, where both a | AA482659, AA455837, AA488554, AA620470, AA781416, AA844227, AI090902, | |
| | and b correspond to the positions of nucleotide | T19161 | |
| | residues shown in SEQ ID NO: 446, and where b is | | |
| | greater than or equal to a + 14. | | |
| 840625 | Preferably excluded from the present invention are | | |
| | one or more polynucleotides comprising a nucleotide | | |
| | sequence described by the general formula of a − b, | | |
| | where a is any integer between 1 to 361 of SEQ ID | | |
| | NO: 447, b is an integer of 15 to 375, where both a and | | |
| | b correspond to the positions of nucleotide residues | | |
| | shown in SEQ ID NO: 447, and where b is greater than | | |
| | or equal to a + 14. | | |
| 840626 | Preferably excluded from the present invention are | | |
| | one or more polynucleotides comprising a nucleotide | | |
| | sequence described by the general formula of a − b, | | |
| | where a is any integer between 1 to 1379 of SEQ ID | | |
| | NO: 448, b is an integer of 15 to 1393, where both a | | |
| | and b correspond to the positions of nucleotide | | |
| | residues shown in SEQ ID NO: 448, and where b is | | |
| | greater than or equal to a + 14. | | |
| 840638 | Preferably excluded from the present invention are | H01158, H01159, H05751, H05858, H83341, H83695, N47512, N47513, W39756, | |
| | one or more polynucleotides comprising a nucleotide | W79733, W90027, W90155, AA047691, AA047741, AA086374, AA100549, AA159315, | |
| | sequence described by the general formula of a − b, | AA159414, AA282525, AA282633, AA595381, AA688093, AA744757, AA865203, | |
| | where a is any integer between 1 to 1649 of SEQ ID | AA933811, AA969838, AA975917, F18424, D12197, D12219, AA478596, AA665540, | |
| | NO: 449, b is an integer of 15 to 1663, where both a | AA909221, AA969720, AI049820 | |
| | and b correspond to the positions of nucleotide | | |
| | residues shown in SEQ ID NO: 449, and where b is | | |
| | greater than or equal to a + 14. | | |
| 840649 | Preferably excluded from the present invention are | R00133, R22651, R44356, R44356, R56353, R93194, N47106, N50316, N50780, | |
| | one or more polynucleotides comprising a nucleotide | N55139, AA010596, AA010597, AA012940, AA012888, AA013216, AA013313, | |
| | sequence described by the general formula of a − b, | AA017544, AA017417, AA047814, AA047792, AA235545, AA262268, AA262879, | |
| | where a is any integer between 1 to 1366 of SEQ ID | AA563873, AA570239, AA573586, AA827412, AA862337, AA902472, AA962409, | |
| | NO: 450, b is an integer of 15 to 1380, where both a | AA971292, AA973596, A1056509, A1080455, AA410833, T23822, T16761 | |
| | and b correspond to the positions of nucleotide | | |
| | residues shown in SEQ ID NO: 450, and where b is | | |
| | greater than or equal to a + 14. | | |
| 840651 | Preferably excluded from the present invention are | | |
| | one or more polynucleotides comprising a nucleotide | | |
| | sequence described by the general formula of a − b, | | |
| | where a is any integer between 1 to 912 of SEQ ID | | |
| | NO: 451, b is an integer of 15 to 926, where both a and | | |
| | b correspond to the positions of nucleotide residues | | |
| | shown in SEQ ID NO: 451, and where b is greater than | | |
| | or equal to a + 14. | | |
| 840666 | Preferably excluded from the present invention are | N32778, N34353, N34537, N41780, N42818, N93337, W25190, AA035229, AA035230, | |
| | one or more polynucleotides comprising a nucleotide | AA044070, AA044162, AA195074, AA195174, AA419441, AA731906, AA761315, | |
| | sequence described by the general formula of a − b, | AA761330, AA766382, AA766593, AA769537, AA805515, AA806516, AA809893, | |
| | where a is any integer between 1 to 1628 of SEQ ID | AA814954, AA857917, N44554, AA393941, AI074651, T10618, Z35722 | |
| | NO: 452, b is an integer of 15 to 1642, where both a | | |
| | and b correspond to the positions of nucleotide | | |
| | residues shown in SEQ ID NO: 452, and where b is | | |
| | greater than or equal to a + 14. | | |
| 840681 | Preferably excluded from the present invention are | | |
| | one or more polynucleotides comprising a nucleotide | | |
| | sequence described by the general formula of a − b, | | |
| | where a is any integer between 1 to 2240 of SEQ ID | | |
| | NO: 453, b is an integer of 15 to 2254, where both a | | |
| | and b correspond to the positions of nucleotide | | |
| | residues shown in SEQ ID NO: 453, and where b is | | |
| | greater than or equal to a + 14. | | |
| 840682 | Preferably excluded from the present invention are | | |
| | one or more polynucleotides comprising a nucleotide | | |
| | sequence described by the general formula of a − b, | | |
| | where a is any integer between 1 to 1917 of SEQ ID | | |
| | NO: 454, b is an integer of 15 to 1931, where both a | | |
| | and b correspond to the positions of nucleotide | | |
| | residues shown in SEQ ID NO: 454, and where b is | | |
| | greater than or equal to a + 14. | | |
| 840684 | Preferably excluded from the present invention are | | |
| | one or more polynucleotides comprising a nucleotide | | |
| | sequence described by the general formula of a − b, | | |
| | where a is any integer between 1 to 757 of SEQ ID | | |
| | NO: 455, b is an integer of 15 to 771, where both a and | | |
| | correspond to the positions of nucleotide residues | | |
| | shown in SEQ ID NO: 455, and where b is greater than | | |
| | or equal to a + 14. | | |
| 840697 | Preferably excluded from the present invention are | R00751, R02584, R02703, R69879, R69927, H13156, H29249, H29248, H41216, | |
| | one or more polynucleotides comprising a nucleotide | R83398, H54666, H54667, H73551, H73552, H90468, H91760, H97869, N31729, | |
| | sequence described by the general formula of a − b, | N31735, N51232, W32147, W32175, W44313, W45660, W57760, W57761, W68386, | |
| | where a is any integer between 1 to 1155 of SEQ ID | W68502, W68752, W68835, W72538, W76163, AA035740, AA043246, AA043585, | |
| | NO: 456, b is an integer of 15 to 1169, where both a | AA044419, AA043053, AA047593, AA047601, AA088798, AA147253, AA155747, | |
| | and b correspond to the positions of nucleotide | AA160105, AA165689, AA172386, AA173747, AA189005, AA189006, AA471066, | |
| | residues shown in SEQ ID NO: 456, and where b is | AA507210, AA513086, AA516406, AA514685, AA635861, AA657400, AA668796, | |
| | greater than or equal to a + 14. | AA737126, AA768005, AA768358, AA887459, AA977176, D80509, D81008, D81471, | |
| | | D81800, D82666, N83795, AA643662, AA284937, AA290823, AA447984, AA448126, | |
| | | AA676807, AA709464, AA780333, AA843801, AA853391, AA868403, AA917460, | |
| | | T17166, T17177, T16671, T48481, T48507 | |
| 840698 | Preferably excluded from the present invention are | | |
| | one or more polynucleotides comprising a nucleotide | | |
| | sequence described by the general formula of a − b, | | |
| | where a is any integer between 1 to 3235 of SEQ ID | | |
| | NO: 457, b is an integer of 15 to 3249, where both a | | |
| | and b correspond to the positions of nucleotide | | |
| | residues shown in SEQ ID NO: 457, and where b is | | |
| | greater than or equal to a + 14. | | |
| 840708 | Preferably excluded from the present invention are | R21272, R45362, R45362, H06049, H13385, AA082768, AA101114, AA131634, | |
| | one or more polynucleotides comprising a nucleotide | AA131718, AA152290, AA150232, AA418083, AA418230, AA422115, AA424919, | |
| | sequence described by the general formula of a − b, | AA426139, AA741277, AA749290, AA811505, AA836102, AA411231, AA453804, | |
| | where a is any integer between 1 to 1902 of SEQ ID | AA453890, AA758905, AA769817, AA770192, AA904708, AA905158, AA969156, | |
| | NO: 458, b is an integer of 15 to 1916, where both a | AI093952, Z42470, Z41665, Z44053 | |
| | and b correspond to the positions of nucleotide | | |
| | residues shown in SEQ ID NO: 458, and where b is | | |
| | greater than or equal to a + 14. | | |
| 840714 | Preferably excluded from the present invention are | | |
| | one or more polynucleotides comprising a nucleotide | | |
| | sequence described by the general formula of a − b, | | |
| | where a is any integer between 1 to 2759 of SEQ ID | | |
| | NO: 459, b is an integer of 15 to 2773, where both a | | |
| | and b correspond to the positions of nucleotide | | |
| | residues shown in SEQ ID NO: 459, and where b is | | |
| | greater than or equal to a + 14. | | |
| 840716 | Preferably excluded from the present invention are | | |
| | one or more polynucleotides comprising a nucleotide | | |
| | sequence described by the general formula of a − b, | | |
| | where a is any integer between 1 to 2017 of SEQ ID | | |
| | NO: 460, b is an integer of 15 to 2031, where both a | | |
| | and b correspond to the positions of nucleotide | | |
| | residues shown in SEQ ID NO: 460, and where b is | | |
| | greater than or equal to a + 14. | | |
| 840721 | Preferably excluded from the present invention are | | |
| | one or more polynucleotides comprising a nucleotide | | |
| | sequence described by the general formula of a − b, | | |
| | where a is any integer between 1 to 1825 of SEQ ID | | |
| | NO: 461, b is an integer of 15 to 1839, where both a | | |
| | and b correspond to the positions of nucleotide | | |
| | residues shown in SEQ ID NO: 461, and where b is | | |
| | greater than or equal to a + 14. | | |
| 840735 | Preferably excluded from the present invention are | T47277, T56085, T93319, T85388, H57620, 1158465, N77902, N80219, N93978, | |
| | one or more polynucleotides comprising a nucleotide | W19715, W37380, W37643, W38508, W38722, W47048, W68079, W67976, W69349, | |
| | sequence described by the general formula of a − b, | W69350, AA025313, AA024560, AA063371, AA063370, AA463222, AA463223, | |
| | where a is any integer between 1 to 765 of SEQ ID | AA424422, AA469264, AA480510, AA507733, AA524348, AA557233, AA602394, | |
| | NO: 462,b is an integer of 15 to 779, where both a and | AA603318, AA631014, AA569554, AA575944, AA688112, AA911131, AA932225, | |
| | correspond to the positions of nucleotide residues | AA937015, AA994856, AI077707, N92552, W00604, C00184, AA292823, AA401683, | |
| | shown in SEQ ID NO: 462, and where b is greater than | AA663906, AA664122, AA771943, AA779608, AA812529, AI028120, AI027559, | |
| | or equal to a + 14. | AI032511, AI033880, AI034204, AI078458, AI041685, D31473, T64469 | |
| 840738 | Preferably excluded from the present invention are | | |
| | one or more polynucleotides comprising a nucleotide | | |
| | sequence described by the general formula of a − b, | | |
| | where a is any integer between 1 to 1703 of SEQ ID | | |
| | NO: 463, b is an integer of 15 to 1717, where both a | | |
| | and b correspond to the positions of nucleotide | | |
| | residues shown in SEQ ID NO: 463, and where b is | | |
| | greater than or equal to a + 14. | | |
| 840745 | Preferably excluded from the present invention are | | |
| | one or more polynucleotides comprising a nucleotide | | |
| | sequence described by the general formula of a − b, | | |
| | where a is any integer between 1 to 814 of SEQ ID | | |
| | NO: 464, b is an integer of 15 to 828, where both a and | | |
| | b correspond to the positions of nucleotide residues | | |
| | shown in SEQ ID NO: 464, and where b is greater than | | |
| | or equal to a + 14. | | |
| 840747 | Preferably excluded from the present invention are | | |
| | one or more polynucleotides comprising a nucleotide | | |
| | sequence described by the general formula of a − b, | | |
| | where a is any integer between 1 to 1159 of SEQ ID | | |
| | NO: 465, b is an integer of 15 to 1173, where both a | | |
| | and b correspond to the positions of nucleotide | | |
| | residues shown in SEQ ID NO: 465, and where b is | | |
| | greater than or equal to a + 14. | | |
| 840756 | Preferably excluded from the present invention are | A074254 | |
| | one or more polynucleotides comprising a nucleotide | | |
| | sequence described by the general formula of a − b, | | |
| | where a is any integer between 1 to 507 of SEQ ID | | |
| | NO: 466, b is an integer of 15 to 521, where both a and | | |
| | correspond to the positions of nucleotide residues | | |
| | shown in SEQ ID NO: 466, and where b is greater than | | |
| | or equal to a + 14. | | |
| 840776 | Preferably excluded from the present invention are | T47069, T47068, T63511, T63587, T79637, T79722, R36141, R36419, R65831, R65934, | |
| | one or more polynucleotides comprising a nucleotide | R69612, R69701, H00464, H00514, H04572, H04575, H12602, H12652, H13166, | |
| | sequence described by the general formula of a − b, | H66218, H67195, H67868, H67868, N62959, W92249, W92250, W92609, W95234, | |
| | where a is any integer between 1 to 1414 of SEQ ID | AA007598, AA193373, AA195360, AA195359, AA425046, AA430627, AA428172, | |
| | NO: 467, b is an integer of 15 to 1428, where both a | AA484871, AA557201, AA902998, AA927360, N79862, AA479674, AA477192, | |
| | and b correspond to the positions of nucleotide | AA481418, AA481651, AA495983, AA496377, AA496655, AA912146, AA912181, | |
| | residues shown in SEQ ID NO: 467, and where b is | AI049805, AA693485 | |
| | greater than or equal to a + 14. | | |
| 840784 | Preferably excluded from the present invention are | | |
| | one or more polynucleotides comprising a nucleotide | | |
| | sequence described by the general formula of a − b, | | |
| | where a is any integer between 1 to 3449 of SEQ ID | | |
| | NO: 468, b is an integer of 15 to 3463, where both a | | |
| | and b correspond to the positions of nucleotide | | |
| | residues shown in SEQ ID NO: 468, and where b is | | |
| | greater than or equal to a + 14. | | |
| 840788 | Preferably excluded from the present invention are | | |
| | one or more polynucleotides comprising a nucleotide | | |
| | sequence described by the general formula of a − b, | | |
| | where a is any integer between 1 to 607 of SEQ ID | | |
| | NO: 469, b is an integer of 15 to 621, where both a and | | |
| | correspond to the positions of nucleotide residues | | |
| | shown in SEQ ID NO: 469, and where b is greater than | | |
| | or equal to a + 14. | | |
| 840794 | Preferably excluded from the present invention are | | |
| | one or more polynucleotides comprising a nucleotide | | |
| | sequence described by the general formula of a − b, | | |
| | where a is any integer between 1 to 1819 of SEQ ID | | |
| | NO: 470, b is an integer of 15 to 1833, where both a | | |
| | and b correspond to the positions of nucleotide | | |
| | residues shown in SEQ ID NO: 470, and where b is | | |
| | greater than or equal to a + 14. | | |
| 840797 | Preferably excluded from the present invention are | | |
| | one or more polynucleotides comprising a nucleotide | | |
| | sequence described by the general formula of a − b, | | |
| | where a is any integer between 1 to 3188 of SEQ ID | | |
| | NO: 471, b is an integer of 15 to 3202, where both a | | |
| | and b correspond to the positions of nucleotide | | |
| | residues shown in SEQ ID NO: 471, and where b is | | |
| | greater than or equal to a + 14. | | |
| 840799 | Preferably excluded from the present invention are | | |
| | one or more polynucleotides comprising a nucleotide | | |
| | sequence described by the general formula of a − b, | | |
| | where a is any integer between 1 to 927 of SEQ ID | | |
| | NO: 472, b is an integer of 15 to 941, where both a and | | |
| | correspond to the positions of nucleotide residues | | |
| | shown in SEQ ID NO: 472, and where b is greater than | | |
| | or equal to a + 14. | | |
| 840818 | Preferably excluded from the present invention are | | |
| | one or more polynucleotides comprising a nucleotide | | |
| | sequence described by the general formula of a − b, | | |
| | where a is any integer between 1 to 1265 of SEQ ID | | |
| | NO: 473, b is an integer of 15 to 1279, where both a | | |
| | and b correspond to the positions of nucleotide | | |
| | residues shown in SEQ ID NO: 473, and where b is | | |
| | greater than or equal to a + 14. | | |
| 840822 | Preferably excluded from the present invention are | T47621, T77305, T83423, R18484, R51973, R51974, H06082, H12940, | |
| | one or more polynucleotides comprising a nucleotide | H27135, H45895, H45904, N72089, W00342, W52213, W96404, AA045488, AA058907, | |
| | sequence described by the general formula of a − b, | AA062768, AA069032, AA081439, AA082427, AA084417, AA101216, AA234022, | |
| | where a is any integer between 1 to 3195 of SEQ ID | AA534011, AA565390, AA588319, AA588430, AA568701, AA635907, AA579930, | |
| | NO: 474, b is an integer of 15 to 3209, where both a | AA827039, AA857519, AA872490, AA904077, AA995057, A1073336, N95359, | |
| | and b correspond to the positions of nucleotide | C15883, AA781445, AA906492, AI037943, AI039428 | |
| | residues shown in SEQ ID NO: 474, and where b is | | |
| | greater than or equal to a + 14. | | |
| 840830 | Preferably excluded from the present invention are | N33920, N33932, N49642, N49629, AA508747, AA514767, AA583465, AA805203, | |
| | one or more polynucleotides comprising a nucleotide | AA878968, U37231, T24573 | |
| | sequence described by the general formula of a − b, | | |
| | where a is any integer between 1 to 819 of SEQ ID | | |
| | NO: 475, b is an integer of 15 to 833, where both a and | | |
| | b correspond to the positions of nucleotide residues | | |
| | shown in SEQ ID NO: 475, and where b is greater than | | |
| | or equal to a + 14. | | |
| 840846 | Preferably excluded from the present invention are | T68706, T68719, T68771, T68784, T73424, T63431, T73486, T73492, T73499, T73535, | |
| | one or more polynucleotides comprising a nucleotide | T89865, R11465, T79345, T79774, T81799, T82119, T82855, T96198, T96454, T96686, | |
| | sequence described by the general formula of a − b, | T96802, T96920, T97027, T99996, T99997, R00156, R00157, R83404, R85816, R91357, | |
| | where a is any integer between 1 to 1127 of SEQ ID | R93314, R94713, R94794, R97348, R99024, R99798, H48280, H48369, H48754, | |
| | NO: 476, b is an integer of 15 to 1141, where both a | H54738, H54739, H55985, H55984, H56050, H56244, 1157662, H57872, H57873, | |
| | and b correspond to the positions of nucleotide | H58502, H60170, H60211, H62933, H69203, H69228, H69229, H71630, H73011, | |
| | residues shown in SEQ ID NO: 476, and where b is | H73012, H81193, H81194, H90826, H91385, N33963, N49672, N49822, N52577, | |
| | greater than or equal to a + 14. | N54836, N58435, N64440, N66934, N69249, N69373, N74062, N75759, N78025, | |
| | | N78145, N94249, N95116, W03303, W01169, W01912, N91401, AA025243, AA026028, | |
| | | AA193126, AA194255, AA236507, AA242995, AA622239, AA575858, AA575872, | |
| | | AA576026, AA576150, AA576597, AA864932, AA877934, AA969761, AA994970, | |
| | | AI017867, D82634, C21067, AA431221, AA779655, AA782374, AA812640, | |
| | | AA923315, AA962377, AA993251, A1018445, A1025584, A1092470, T79311 | |
| 840848 | Preferably excluded from the present invention are | R10066, R10163, T26606, R61067, R72646, H08322, H47858, H47859, R86048, | |
| | one or more polynucleotides comprising a nucleotide | H68866, H68867, H69098, H82364, N58491, N78080, W52876, W60083, AA043086, | |
| | sequence described by the general formula of a − b, | AA045865, AA045866, AA055712, AA057298, AA058743, AA079887, AA079888, | |
| | where a is any integer between 1 to 1088 of SEQ ID | AA099233, AA099234, AA102153, AA113213, AA115932, AA121000, AA131067, | |
| | NO: 477, b is an integer of 15 to 1102, where both a | AA143412, AA146598, AA155632, AA155688, AA160447, AA173257, AA173248, | |
| | and b correspond to the positions of nucleotide | AA195987, AA196375, AA233537, AA463552, AA503072, AA551794, AA586410, | |
| | residues shown in SEQ ID NO: 477, and where b is | AA594814, AA613123, AA573356, AA580449, AA731195, AA742856, AA827930, | |
| | greater than or equal to a + 14. | AA863440, AA865529, AA876847, AA953614, AA976924, N84278, N88762, C17112, | |
| | | AA219765, AA284503, AA293437, AA293046, AA669435, AA722103, AI027785, | |
| | | AI073617, AI092707, T17392, F08770, D12026 | |
| 840860 | Preferably excluded from the present invention are | T89645, T89919, T93704, R21871, R22387, R78094, R78181, R78515, R78560, H40124, | |
| | one or more polynucleotides comprising a nucleotide | H41731, N28359, N42893, N62851, N64787, N67463, N76199, N77065, N77758, | |
| | sequence described by the general formula of a − b, | W67341, W68381, AA034244, AA044935, AA045056, AA057392, AA057684, | |
| | where a is any integer between 1 to 4187 of SEQ ID | AA071214, AA071442, AA081937, AA082360, AA082229, AA082230, AA082708, | |
| | NO: 478, b is an integer of 15 to 4201, where both a | AA083297, AA083188, AA127585, AA149575, AA151791, AA167113, AA173360, | |
| | and b correspond to the positions of nucleotide | AA191227, AA195437, AA223329, AA223614, AA243268, AA261939, AA262815, | |
| | residues shown in SEQ ID NO: 478, and where b is | AA262816, AA422160, AA426276, AA225924, AA504466, AA504634, AA522823, | |
| | greater than or equal to a + 14. | AA554566, AA632813, AA576873, AA662886, AA730326, AA748669, AA828942, | |
| | | AA837197, AA857065, AA857683, AA862276, AA864246, AA873317, AI083733, | |
| | | D82604, D82635, N81179, N85023, N85166, N85712, C00193, C00199, C02425, | |
| | | N87331, N88683, N88852, N89408, C02916, C05151, C06382, AA642209, C21319, | |
| | | AA091285, AA091688, AA094300, AA205974, AA206268, AA206598, AA205324, | |
| | | AA649340, AA247212, AA404505, AA421263, AA421361, D11545, AA441853, | |
| | | AA441826, AA463350, AA463858, AA487271, AA487388, AA496439, AA496488, | |
| | | AA634627, AA663685, AA665466, AA456144, AA722996, AA772136, AA772153, | |
| | | A774179, AA992418, AI076734, T10506, Z30218, Z38961, T16262, T48571, D31110, | |
| | | D45597, F06042, F00682 | |
| 840861 | Preferably excluded from the present invention are | T52180, T52256, T57048, T60934, T60993, T94137, T94228, T91060, T85924, T23216, | |
| | one or more polynucleotides comprising a nucleotide | R23292, R31316, R31576, R62640, R62693, H03198, H18231, H18269, H22414, | |
| | sequence described by the general formula of a − b, | H26112, H26116, H26378, H40754, H38895, H47721, H48072, R89134, R89141, | |
| | where a is any integer between 1 to 773 of SEQ ID | R91829, R91836, R98452, H65626, H65627, H69728, H71913, H71914, H78844, | |
| | NO: 479, b is an integer of 15 to 787, where both a and | H80090, H83062, H84585, H87467, H87577, H93457, H93458, N23179, N30549, | |
| | b correspond to the positions of nucleotide residues | N32644, N39052, N40455, N48060, N48244, N53258, N53755, N63557, N94559, | |
| | shown in SEQ ID NO: 479, and where b is greater than | N94883, N94981, N95791, N42987, W19445, W19573, W23831, W24902, W30850, | |
| | or equal to a + 14. | W32700, W32701, W37523, W56867, W60497, W60972, W61219, W69268, W69346, | |
| | | W80426, W80556, W94817, W95832, W95966, W96035, W96092, N90310, AA010147, | |
| | | AA010148, AA025440, AA025757, AA027347, AA027822, AA027874, AA029650, | |
| | | AA029651, AA037779, AA039260, AA046801, AA046818, AA054707, AA058654, | |
| | | AA062684, AA063287, AA074876, AA074979, AA084381, AA085264, AA085328, | |
| | | AA085598, AA122190, AA120978, AA133892, AA129630, AA172403, AA172206, | |
| | | AA190489, AA190525, AA464455, AA464996, AA225769, AA259210, AA483109, | |
| | | AA483741, AA493542, AA502162, AA516183, AA522567, AA526813, AA557654, | |
| | | AA588882, AA593799, AA576216, AA659530, AA662308, AA688246, AA688254, | |
| | | AA687457, AA687516, AA689236, AA728852, AA729032, AA747479, AA747979, | |
| | | AA831447, AA887348, AA903105, AA916516, AA934714, AA953363, AA976759, | |
| | | AA991410, AA991434, AI002147, AI028033, N83338, C02469, R29174, AA090669, | |
| | | AA092066, AA648634, AA443968, AA444149, AA482243, AA482340, AA485406, | |
| | | AA598458, AA644566, AA664032, AA680199, AA676482, AA629708, AA630110, | |
| | | AA457100, AA431269, AA405296, AA405332, AA721997, AA724146, AA774657, | |
| | | AA781529, AA781641, AA781838, AA782849, AA813171, AA843229, AA846744, | |
| | | AA846814, AA854299, AA854765, AA789029, AA993047, AI023973, AI027725, | |
| | | AI031943, AI038463, AI041602, AI085085, AI086504, AI088189 | |
| 840871 | Preferably excluded from the present invention are | H42821, AA028094, AA099211, AA160368, AA223572, AA232552, AA252811 | |
| | one or more polynucleotides comprising a nucleotide | | |
| | sequence described by the general formula of a − b, | | |
| | where a is any integer between 1 to 717 of SEQ ID | | |
| | NO: 480, b is an integer of 15 to 731, where both a and | | |
| | b correspond to the positions of nucleotide residues | | |
| | shown in SEQ ID NO: 480, and where b is greater than | | |
| | or equal to a + 14. | | |
| 840874 | Preferably excluded from the present invention are | | |
| | one or more polynucleotides comprising a nucleotide | | |
| | sequence described by the general formula of a − b, | | |
| | where a is any integer between 1 to 1105 of SEQ ID | | |
| | NO: 481, b is an integer of 15 to 1119, where both a | | |
| | and b correspond to the positions of nucleotide | | |
| | residues shown in SEQ ID NO: 481, and where b is | | |
| | greater than or equal to a + 14. | | |
| 840878 | Preferably excluded from the present invention are | T40405, T41252, T47240, T47241, T50233, T52891, T57110, T58359, T19508, R43858, | |
| | one or more polynucleotides comprising a nucleotide | R43858, R75598, R75665, H13192, H13193, N25264, N31900, N42683, N72995, | |
| | sequence described by the general formula of a − b, | N93388, W25360, W47628, W47629, AA009691, AA009410, AA045777, AA045910, | |
| | where a is any integer between 1 to 2042 of SEQ ID | AA063040, AA063076, AA130044, AA149205, AA149206, AA191678, AA252698, | |
| | NO: 482, b is an integer of 15 to 2056, where both a | AA464304, AA225264, AA514845, AA526726, AA548411, AA548704, AA552050, | |
| | and b correspond to the positions of nucleotide | AA552558, AA568675, AA827017, AA834447, AA838450, AA886357, AA886653, | |
| | residues shown in SEQ ID NO: 482, and where b is | AA887879, AA916602, AA928685, AA968793, A1005016, W28859, AA134038, | |
| | greater than or equal to a + 14. | AA455118, AA496380, AA496656, AA598830, AA653270, AA725217, AA733068, | |
| | | AI004394, AI023815, AI026954, AI040891, Z25388, Z28470, AA702322 | |
| 840880 | Preferably excluded from the present invention are | H02306, H02418, N48196, N53344, AA059013, AA506159, AA613938, AA662759, | |
| | one or more polynucleotides comprising a nucleotide | AA976725, AA854631 | |
| | sequence described by the general formula of a − b, | | |
| | where a is any integer between 1 to 873 of SEQ ID | | |
| | NO: 483, b is an integer of 15 to 887, where both a and | | |
| | correspond to the positions of nucleotide residues | | |
| | shown in SEQ ID NO: 483, and where b is greater than | | |
| | or equal to a + 14. | | |
| 840884 | Preferably excluded from the present invention are | | |
| | one or more polynucleotides comprising a nucleotide | | |
| | sequence described by the general formula of a − b, | | |
| | where a is any integer between 1 to 1864 of SEQ ID | | |
| | NO: 484, b is an integer of 15 to 1878, where both a | | |
| | and b correspond to the positions of nucleotide | | |
| | residues shown in SEQ ID NO: 484, and where b is | | |
| | greater than or equal to a + 14. | | |
| 840907 | Preferably excluded from the present invention are | | |
| | one or more polynucleotides comprising a nucleotide | | |
| | sequence described by the general formula of a − b, | | |
| | where a is any integer between 1 to 1552 of SEQ ID | | |
| | NO: 485, b is an integer of 15 to 1566, where both a | | |
| | and b correspond to the positions of nucleotide | | |
| | residues shown in SEQ ID NO: 485, and where b is | | |
| | greater than or equal to a + 14. | | |
| 840926 | Preferably excluded from the present invention are | | |
| | one or more polynucleotides comprising a nucleotide | | |
| | sequence described by the general formula of a − b, | | |
| | where a is any integer between 1 to 3032 of SEQ ID | | |
| | NO: 486, b is an integer of 15 to 3046, where both a | | |
| | and b correspond to the positions of nucleotide | | |
| | residues shown in SEQ ID NO: 486, and where b is | | |
| | greater than or equal to a + 14. | | |
| 840932 | Preferably excluded from the present invention are | | |
| | one or more polynucleotides comprising a nucleotide | | |
| | sequence described by the general formula of a − b, | | |
| | where a is any integer between 1 to 1890 of SEQ ID | | |
| | NO: 487, b is an integer of 15 to 1904, where both a | | |
| | and b correspond to the positions of nucleotide | | |
| | residues shown in SEQ ID NO: 487, and where b is | | |
| | greater than or equal to a + 14. | | |
| 840940 | Preferably excluded from the present invention are | | |
| | one or more polynucleotides comprising a nucleotide | | |
| | sequence described by the general formula of a − b, | | |
| | where a is any integer between 1 to 813 of SEQ ID | | |
| | NO: 488, b is an integer of 15 to 827, where both a and | | |
| | b correspond to the positions of nucleotide residues | | |
| | shown in SEQ ID NO: 488, and where b is greater than | | |
| | or equal to a + 14. | | |
| 840947 | Preferably excluded from the present invention are | | |
| | one or more polynucleotides comprising a nucleotide | | |
| | sequence described by the general formula of a − b, | | |
| | where a is any integer between 1 to 1912 of SEQ ID | | |
| | NO: 489, b is an integer of 15 to 1926, where both a | | |
| | and b correspond to the positions of nucleotide | | |
| | residues shown in SEQ ID NO: 489, and where b is | | |
| | greater than or equal to a + 14. | | |
| 840959 | Preferably excluded from the present invention are | | |
| | one or more polynucleotides comprising a nucleotide | | |
| | sequence described by the general formula of a − b, | | |
| | where a is any integer between 1 to 1447 of SEQ ID | | |
| | NO: 490, b is an integer of 15 to 1461, where both a | | |
| | and b correspond to the positions of nucleotide | | |
| | residues shown in SEQ ID NO: 490, and where b is | | |
| | greater than or equal to a + 14. | | |
| 840964 | Preferably excluded from the present invention are | R79226, H12332, H51062, H83364, H89523, N27508, N30527, N40233, N52503, | |
| | one or more polynucleotides comprising a nucleotide | N53855, N94367, AA055215, AA055306, AA188169, AA468498, AA470473, | |
| | sequence described by the general formula of a − b, | AA563662, AA622643, AA579613, AA668790, AA748160, AA765447, AA873430, | |
| | where a is any integer between 1 to 791 of SEQ ID | AA879079, AA903275, AA970424, N73354, AA402259, AA883758, AA890505, | |
| | NO: 491, b is an integer of 15 to 805, where both a and | AA906005, AI023931 | |
| | b correspond to the positions of nucleotide residues | | |
| | shown in SEQ ID NO: 491, and where b is greater than | | |
| | or equal to a + 14. | | |
| 840979 | Preferably excluded from the present invention are | | |
| | one or more polynucleotides comprising a nucleotide | | |
| | sequence described by the general formula of a − b, | | |
| | where a is any integer between 1 to 2255 of SEQ ID | | |
| | NO: 492, b is an integer of 15 to 2269, where both a | | |
| | and b correspond to the positions of nucleotide | | |
| | residues shown in SEQ ID NO: 492, and where b is | | |
| | greater than or equal to a + 14. | | |
| 840984 | Preferably excluded from the present invention are | | |
| | one or more polynucleotides comprising a nucleotide | | |
| | sequence described by the general formula of a − b, | | |
| | where a is any integer between 1 to 4094 of SEQ ID | | |
| | NO: 493, b is an integer of 15 to 4108, where both a | | |
| | and b correspond to the positions of nucleotide | | |
| | residues shown in SEQ ID NO: 493, and where b is | | |
| | greater than or equal to a + 14. | | |
| 840986 | Preferably excluded from the present invention are | H25393, H25394, H25511, H25512, R95750, R95794, H64076, H64131, H68715, | |
| | one or more polynucleotides comprising a nucleotide | H80548, H80604, H94681, H95039, H99481, N28293, N30167, N35782, W47389, | |
| | sequence described by the general formula of a − b, | W47262, W61304, W65368, AA054346, AA054383, AA058320, AA058448, AA512954, | |
| | where a is any integer between 1 to 2195 of SEQ ID | AA558416, AA588459, AA935690, AI097565, N87339, AA993027, AA993568, | |
| | NO: 494, b is an integer of 15 to 2209, where both a | AA701454, AA702350 | |
| | and b correspond to the positions of nucleotide | | |
| | residues shown in SEQ ID NO: 494, and where b is | | |
| | greater than or equal to a + 14. | | |
| 840988 | Preferably excluded from the present invention are | T87048, R24473, R43337, R43337, N75007, W05750, AA182467, AA227466, | |
| | one or more polynucleotides comprising a nucleotide | AA504464, AA504538, AA923479, AA648887, AA663889, AI027636, AI028506, | |
| | sequence described by the general formula of a − b, | AI026720, Z42717 | |
| | where a is any integer between 1 to 1663 of SEQ ID | | |
| | NO: 495, b is an integer of 15 to 1677, where both a | | |
| | and b correspond to the positions of nucleotide | | |
| | residues shown in SEQ ID NO: 495, and where b is | | |
| | greater than or equal to a + 14. | | |
| 840990 | Preferably excluded from the present invention are | | |
| | one or more polynucleotides comprising a nucleotide | | |
| | sequence described by the general formula of a − b, | | |
| | where a is any integer between 1 to 1688 of SEQ ID | | |
| | NO: 496, b is an integer of 15 to 1702, where both a | | |
| | and b correspond to the positions of nucleotide | | |
| | residues shown in SEQ ID NO: 496, and where b is | | |
| | greater than or equal to a + 14. | | |
| 840992 | Preferably excluded from the present invention are | | |
| | one or more polynucleotides comprising a nucleotide | | |
| | sequence described by the general formula of a − b, | | |
| | where a is any integer between 1 to 2362 of SEQ ID | | |
| | NO: 497, b is an integer of 15 to 2376, where both a | | |
| | and b correspond to the positions of nucleotide | | |
| | residues shown in SEQ ID NO: 497, and where b is | | |
| | greater than or equal to a + 14. | | |
| 841009 | Preferably excluded from the present invention are | T40334, T41195, 179150, T79231, 185615, T98895, T99485, R25796, H03311, H03312, | |
| | one or more polynucleotides comprising a nucleotide | H11314, H21245, R91754, R91755, R93025, R97834, R97886, R99577, R99583, | |
| | sequence described by the general formula of a − b, | R99683, R99689, H88057, H97799, H97870, N34019, N35363, N42786, N44738, | |
| | where a is any integer between 1 to 826 of SEQ ID | N52502, N70158, N72884, N74746, N93542, N95357, N98354, W01181, W03108, | |
| | NO: 498, b is an integer of 15 to 840, where both a and | W15165, W19587, W21350, W24700, W24805, W39226, W48682, W49637, W49739, | |
| | correspond to the positions of nucleotide residues | W51977, W67546, W67528, W67665, W79731, W93828, W93829, AA025348, | |
| | shown in SEQ ID NO: 498, and where b is greater than | AA025356, AA024401, AA024402, AA029589, AA029588, AA099331, AA099865, | |
| | or equal to a + 14. | AA121627, AA126717, AA126816, AA126817, AA133155, AA165162, AA165163, | |
| | | AA557332, AA640015, AA579505, AA665011, AA665221, AA738009, AA830748, | |
| | | AA918150, AA918992, AA947223, AA974955, A1083731, N56157, N89240, | |
| | | AA092060, AA094384, AA650291, AA292814, AA402491, F20671, F21115, D11655, | |
| | | D11564, D11605, D12048, AA634049, U54738, AA732766, AA782030, AA843638, | |
| | | AA860477, AA861482, AI018649, AI092171, Z28714, T23956, AA694568 | |
| 841012 | Preferably excluded from the present invention are | | |
| | one or more polynucleotides comprising a nucleotide | | |
| | sequence described by the general formula of a − b, | | |
| | where a is any integer between 1 to 447 of SEQ ID | | |
| | NO: 499, b is an integer of 15 to 461, where both a and | | |
| | b correspond to the positions of nucleotide residues | | |
| | shown in SEQ ID NO: 499, and where b is greater than | | |
| | or equal to a + 14. | | |
| 841016 | Preferably excluded from the present invention are | R21854, R21868, R23349, R27518, R63726, R63775, R65731, R65957, R65958, | |
| | one or more polynucleotides comprising a nucleotide | R66192, R66977, R66978, R67072, R69600, R69690, H12415, H12416, N46541, | |
| | sequence described by the general formula of a − b, | N47260, N47778, N48572, N51984, N95008, W25613, W31713, W32142, W38029, | |
| | where a is any integer between 1 to 2768 of SEQ ID | W38650, W38655, AA034256, AA037658, AA037660, AA039268, AA042908, | |
| | NO: 500, b is an integer of 15 to 2782, where both a | AA042921, AA063533, AA126558, AA130121, AA130157, AA137270, AA136020, | |
| | and b correspond to the positions of nucleotide | AA232954, AA233044, AA429346, AA429872, AA565520, AA604780, AA610435, | |
| | residues shown in SEQ ID NO: 500, and where b is | AA631349, AA631518, AA740206, AA770618, AA912228, A1079705, N84191, | |
| | greater than or equal to a + 14. | N85956, N92894, W38030, C00380, N83173, C03262, AA092010, U82782, AA247592, | |
| | | AA284977, AA283619, AA291890, AA293636, AA410312, AA410537, AA453566, | |
| | | AA487623, AA626442, AA628932, AA629190, AA629753, AA629916, AA719528, | |
| | | AA843073, AA844228, AA890492, AI024670, AI051881, AI061324, T11149 | |
| 841017 | Preferably excluded from the present invention are | R21764, R21815, N71125, W17312, AA112660, AA179538, AA179507, AA902202, | |
| | one or more polynucleotides comprising a nucleotide | AA907419, AA913594, AA994481, AI049652 | |
| | sequence described by the general formula of a − b, | | |
| | where a is any integer between 1 to 1235 of SEQ ID | | |
| | NO: 501, b is an integer of 15 to 1249, where both a | | |
| | and b correspond to the positions of nucleotide | | |
| | residues shown in SEQ ID NO: 501, and where b is | | |
| | greater than or equal to a + 14. | | |
| 841021 | Preferably excluded from the present invention are | R23836, W38704, AA033686, AA176734, AA192268, AA525913, AA531505, | |
| | one or more polynucleotides comprising a nucleotide | AA532666, AA533781, AA533827, AA533949, AA554396, AA576754, AA906883, | |
| | sequence described by the general formula of a − b, | N24273, C14272, C14285, C14286, C18998 | |
| | where a is any integer between 1 to 1344 of SEQ ID | | |
| | NO: 502, b is an integer of 15 to 1358, where both a | | |
| | and b correspond to the positions of nucleotide | | |
| | residues shown in SEQ ID NO: 502, and where b is | | |
| | greater than or equal to a + 14. | | |
| 841032 | Preferably excluded from the present invention are | T41136, T52990, T52991, T61494, T63001, T63145, T87321, T87328, T89480, T84361, | |
| | one or more polynucleotides comprising a nucleotide | R05264, N75935, W05120, W25352, AA191627, AA258512, AA418549, AA224774, | |
| | sequence described by the general formula of a − b, | AA225253, AA229538, AA229537, AA229951, AA230318, AA468106, AA468170, | |
| | where a is any integer between 1 to 487 of SEQ ID | AA482814, AA482855, AA482894, AA482906, AA483676, AA491563, AA491627, | |
| | NO: 503, b is an integer of 15 to 501, where both a and | AA492175, AA501375, AA502205, AA505498, AA508058, AA508125, AA512979, | |
| | correspond to the positions of nucleotide residues | AA513165, AA523347, AA528170, AA531497, AA542840, AA551430, AA553992, | |
| | shown in SEQ ID NO: 503, and where b is greater than | AA554420, AA582164, AA583205, AA593192, AA593362, AA602125, AA603378, | |
| | or equal to a + 14. | AA603728, AA617691, AA622865, AA630937, AA631991, AA570802, AA569520, | |
| | | AA654990, AA664728, AA664864, AA665278, AA729616, AA729639, AA729652, | |
| | | AA730512, AA730705, AA730910, AA737300, AA737303, AA736808, AA736909, | |
| | | AA738098, AA740165, AA740553, AA742574, AA742885, AA746988, AA747057, | |
| | | AA747094, AA747099, AA747961, AA748108, AA804727, AA805835, AA834105, | |
| | | AA838466, AA864527, AA872303, AA875939, AA876612, AA876936, AA879219, | |
| | | AA885735, AA886033, AA888159, AA888528, AA888683, AA903652, AA935001, | |
| | | AA948734, AA947836, AA978250, AA994661, AI073926, AI085517, N83676, N86451, | |
| | | N87989, AA642538, AA090432, AA090481, AA092225, AA091643, AA094678, | |
| | | AA094818, AA095214, AA648652, AA649783, AA650377, AA401641, F21163, | |
| | | AA411822, AA442212, AA609798, AA679909, F22052, AA679265, AA722456, | |
| | | AA1003421, AI028430, AI077884, AI086743, T89286, R05321, AA694044 | |
| 841051 | Preferably excluded from the present invention are | A427363 | |
| | one or more polynucleotides comprising a nucleotide | | |
| | sequence described by the general formula of a − b, | | |
| | where a is any integer between 1 to 1997 of SEQ ID | | |
| | NO: 504, b is an integer of 15 to 2011, where both a | | |
| | and b correspond to the positions of nucleotide | | |
| | residues shown in SEQ ID NO: 504, and where b is | | |
| | greater than or equal to a + 14. | | |
| 841064 | Preferably excluded from the present invention are | R95695, H49073, H61707, H61911, H68517, H89719, H89781, H89828, H90680, | |
| | one or more polynucleotides comprising a nucleotide | N76870, W88654, W88898, AA046748, AA053076, AA053592, AA127256, AA127257, | |
| | sequence described by the general formula of a − b, | AA187351, AA188218, H67307, AA602545, AA720701, AA742288, N87596, | |
| | where a is any integer between 1 to 1975 of SEQ ID | AA094084, AA204976, AA676787, AA703221, AA779414, AI038609, AI074626, | |
| | NO: 505, b is an integer of 15 to 1989, where both a | AI088527, T17364, AA702787 | |
| | and b correspond to the positions of nucleotide | | |
| | residues shown in SEQ ID NO: 505, and where b is | | |
| | greater than or equal to a + 14. | | |
| 841069 | Preferably excluded from the present invention are | | |
| | one or more polynucleotides comprising a nucleotide | | |
| | sequence described by the general formula of a − b, | | |
| | where a is any integer between 1 to 1071 of SEQ ID | | |
| | NO: 506, b is an integer of 15 to 1085, where both a | | |
| | and b correspond to the positions of nucleotide | | |
| | residues shown in SEQ ID NO: 506, and where b is | | |
| | greater than or equal to a + 14. | | |
| 841072 | Preferably excluded from the present invention are | | |
| | one or more polynucleotides comprising a nucleotide | | |
| | sequence described by the general formula of a − b, | | |
| | where a is any integer between 1 to 1471 of SEQ ID | | |
| | NO: 507, b is an integer of 15 to 1485, where both a | | |
| | and b correspond to the positions of nucleotide | | |
| | residues shown in SEQ ID NO: 507, and where b is | | |
| | greater than or equal to a + 14. | | |
| 841078 | Preferably excluded from the present invention are | T39937, T68962, T84426, R20697, R36425, R45643, R45643, R68137, R70943, R70957, | |
| | one or more polynucleotides comprising a nucleotide | R70996, R71011, H02222, H05658, H05659, H25177, H29362, H54732, H54733, | |
| | sequence described by the general formula of a − b, | H60311, H60310, H77561, H77562, H78245, H78446, H82436, H82699, N20477, | |
| | where a is any integer between 1 to 1916 of SEQ ID | N57742, N59418, N59709, N76617, AA029237, AA055009, AA055434, AA236337, | |
| | NO: 508, b is an integer of 15 to 1930, where both a | A425703, AA427773, AA482193, AA482287, AA612777, AA729757, AA737276, | |
| | and b correspond to the positions of nucleotide | AA744359, AA872776, AA972581, C06045, AA446583, AA449748, AA707197, | |
| | residues shown in SEQ ID NO: 508, and where b is | AA757691, AA774691, AA992571, AI003756, AI027513, AI039704, AI042272, | |
| | greater than or equal to a + 14. | AI052652, AI077380, AI083949, AA774036 | |
| 841080 | Preferably excluded from the present invention are | | |
| | one or more polynucleotides comprising a nucleotide | | |
| | sequence described by the general formula of a − b, | | |
| | where a is any integer between 1 to 1120 of SEQ ID | | |
| | NO: 509, b is an integer of 15 to 1134, where both a | | |
| | and b correspond to the positions of nucleotide | | |
| | residues shown in SEQ ID NO: 509, and where b is | | |
| | greater than or equal to a + 14. | | |
| 841088 | Preferably excluded from the present invention are | R00895, R21561, R42090, R42090, H05080, N79589, N94381, W16578, W42724, | |
| | one or more polynucleotides comprising a nucleotide | W42813, W46346, W46347, W47346, W57707, W57783, AA070469, AA490938, | |
| | sequence described by the general formula of a − b, | AA586820, AA580196, AA745683, AA809239, AA931405, D11601, AA725448, | |
| | where a is any integer between 1 to 1368 of SEQ ID | AA992145, AI023735, AI025359, AI031575, AI033697, AI038145, AI093535, F00072 | |
| | NO: 510, b is an integer of 15 to 1382, where both a | | |
| | and b correspond to the positions of nucleotide | | |
| | residues shown in SEQ ID NO: 510, and where b is | | |
| | greater than or equal to a + 14. | | |
| 841092 | Preferably excluded from the present invention are | | |
| | one or more polynucleotides comprising a nucleotide | | |
| | sequence described by the general formula of a − b, | | |
| | where a is any integer between 1 to 1727 of SEQ ID | | |
| | NO: 511, b is an integer of 15 to 1741, where both a | | |
| | and b correspond to the positions of nucleotide | | |
| | residues shown in SEQ ID NO: 511, and where b is | | |
| | greater than or equal to a + 14. | | |
| 841095 | Preferably excluded from the present invention are | W20114, AA255840, AA568302, AA406006, AA434170 | |
| | one or more polynucleotides comprising a nucleotide | | |
| | sequence described by the general formula of a − b, | | |
| | where a is any integer between 1 to 1516 of SEQ ID | | |
| | NO: 512, b is an integer of 15 to 1530, where both a | | |
| | and b correspond to the positions of nucleotide | | |
| | residues shown in SEQ ID NO: 512, and where b is | | |
| | greater than or equal to a + 14. | | |
| 841096 | Preferably excluded from the present invention are | | |
| | one or more polynucleotides comprising a nucleotide | | |
| | sequence described by the general formula of a − b, | | |
| | where a is any integer between 1 to 2985 of SEQ ID | | |
| | NO: 513, b is an integer of 15 to 2999, where both a | | |
| | and b correspond to the positions of nucleotide | | |
| | residues shown in SEQ ID NO: 513, and where b is | | |
| | greater than or equal to a + 14. | | |
| 841102 | Preferably excluded from the present invention are | | |
| | one or more polynucleotides comprising a nucleotide | | |
| | sequence described by the general formula of a − b, | | |
| | where a is any integer between 1 to 2034 of SEQ ID | | |
| | NO: 514, b is an integer of 15 to 2048, where both a | | |
| | and b correspond to the positions of nucleotide | | |
| | residues shown in SEQ ID NO: 514, and where b is | | |
| | greater than or equal to a + 14. | | |
| 841104 | Preferably excluded from the present invention are | T93851, R05295, R05354, R71097, R71445, R99396, N53129, W38359, W38417, | |
| | one or more polynucleotides comprising a nucleotide | W38418, W39384, W44785, W44786, W69719, W69847, W73703, AA134718, | |
| | sequence described by the general formula of a − b, | A164646, AA164647, AA4 18958, AA420439, AA420440, AA548241, AA548224, | |
| | where a is any integer between 1 to 3286 of SEQ ID | AA558195, W73847, Z19840, AA707354, AA868898, AA917430, A1073454, F09131, | |
| | NO: 515, b is an integer of 15 to 3300, where both a | F11469, AA700476 | |
| | and b correspond to the positions of nucleotide | | |
| | Residues shown in SEQ ID NO: 515, and where b is | | |
| | greater than or equal to a + 14. | | |
| 841108 | Preferably excluded from the present invention are | T89709, T89806, T91163, T93774, T93819, T95226. R06420, R06475, R23277, R23370, | |
| | one or more polynucleotides comprising a nucleotide | R32742, R32743, R52354, R52355, R64095, R64184, R65984, R65985, R70225, | |
| | sequence described by the general formula of a − b, | R70226, R76344, R76672, R80205, H00679, H00770, H04254, H24758, H24803, | |
| | where a is any integer between 1 to 3411 of SEQ ID | H40273, H38053, H38054, H47116, H47210, R92478, R94873, R94872, H57866, | |
| | NO: 516, b is an integer of 15 to 3425, where both a | H57867, H59353, H61105, H63261, H63535, H63938, H67759, H67760, H77384, | |
| | and b correspond to the positions of nucleotide | H77385, H82932, H87435, H87541, H88753, H88754, N59081, N59489, N63682, | |
| | residues shown in SEQ ID NO: 516, and where b is | N63939, N66851, N70709, N92122, N99845, W32595, W88585, W90769, W90327, | |
| | greater than or equal to a + 14. | W93082, W93137, AA025425, AA041232, AA114914, AA114913, AA128525, | |
| | | AA235362, AA235944, AA235945, AA425197, AA636023, AA639557, AA729723, | |
| | | AA907495, AI056355, AI089809, AA448599, AA449742, AA476262, AA478567, | |
| | | AA478700, AA599706, AA634117, AA677126, AA716562, AA923333, AA948589, | |
| | | AI051569, AI073816, AI074666, AI080341, AI084428, AI090962, AI096407 | |
| 841118 | Preferably excluded from the present invention are | R20815, R36529, R38448, R46586, R46586, R71122, R71625, R77658, R80438, | |
| | one or more polynucleotides comprising a nucleotide | R80643, H12595, H12644, H99733, N20132, N25939, N29738, N57157, N59874, | |
| | sequence described by the general formula of a − b, | N67154, N67834, W03438, W04625, W31524, AA044199, AA044996, AA135739, | |
| | where a is any integer between 1 to 1344 of SEQ ID | AA135782, AA146912, AA146911, AA173589, AA224431, AA232224, AA256600, | |
| | NO: 517, b is an integer of 15 to 1358, where both a | AA256599, AA419270, AA419321, AA425195, AA484744, AA507823, AA513832, | |
| | and b correspond to the positions of nucleotide | AA584296, AA600955, AA614813, AA807248, AA904059, AA937796, AA973678, | |
| | residues shown in SEQ ID NO: 517, and where b is | AA983325, AA991604, W01284, C16969, AA476260, AA476318, AA476367, | |
| | greater than or equal to a + 14. | AA609550, AA678511, AA722726, AA904676, AA954468, AI001869, AI031538, Z41297 | |
| 841119 | Preferably excluded from the present invention are | R18472, W39766, AA076303, AA985235 | |
| | one or more polynucleotides comprising a nucleotide | | |
| | sequence described by the general formula of a − b, | | |
| | where a is any integer between 1 to 1354 of SEQ ID | | |
| | NO: 518, b is an integer of 15 to 1368, where both a | | |
| | and b correspond to the positions of nucleotide | | |
| | residues shown in SEQ ID NO: 518, and where b is | | |
| | greater than or equal to a + 14. | | |
| 841124 | Preferably excluded from the present invention are | | |
| | one or more polynucleotides comprising a nucleotide | | |
| | sequence described by the general formula of a − b, | | |
| | where a is any integer between 1 to 919 of SEQ ID | | |
| | NO: 519, b is an integer of 15 to 933, where both a and | | |
| | b correspond to the positions of nucleotide residues | | |
| | shown in SEQ ID NO: 519, and where b is greater than | | |
| | or equal to a + 14. | | |
| 841137 | Preferably excluded from the present invention are | T65560, R52978, R59392, H24368, H25185, N33308, AA016160, AA019434, | |
| | one or more polynucleotides comprising a nucleotide | AA082036, AA099724, AA099725, AA101466, AA100553, AA100634, AA100635, | |
| | sequence described by the general formula of a − b, | AA143046, AA150250, AA151129, AA165491, AA172129, AA176104, AA176248, | |
| | where a is any integer between 1 to 1416 of SEQ ID | AA176272, AA197310, AA227454, AA232220, AA243156, AA261904, AA262541, | |
| | NO: 520, b is an integer of 15 to 1430, where both a | AA458854, AA459044, AA481155, AA493247, AA514323, AA522820, AA558368, | |
| | and b correspond to the positions of nucleotide | AA582973, AA604489, AA640528, AA569125, AA569824, AA737640, AA743846, | |
| | residues shown in SEQ ID NO: 520, and where b is | AA808232, AA812222, AA847813, AA865060, AA872242, AA872353, AA922866, | |
| | greater than or equal to a + 14. | AA933823, AA988358, AI056397, AI085865, AI088865, AA205921, AA205923, | |
| | | AA205997, AA204887, AA205731, D11887, AA634040, AA703823, AA703893, | |
| | | Z20424, AA707344, AA707416, AA716243, AA683201, AA890456, AI003274, | |
| | | AI076618, AI090177, T10877, Z28746, T25145, Z40353, F11026, F09670, AA699695, | |
| | | AA701137 | |
| 841143 | Preferably excluded from the present invention are | T52948, T57468, T59332, T91403, T84637, R69314, R69315, R77481, R77675, R77676, | |
| | one or more polynucleotides comprising a nucleotide | H30692, H70576, N24036, N24905, N26173, N35858, N36029, W39771, W45303, | |
| | sequence described by the general formula of a − b, | W80648, W80649, AA029895, AA029983, AA036639, AA036850, AA043430, | |
| | where a is any integer between 1 to 1155 of SEQ ID | AA043431, AA046109, AA046196, AA076106, AA076107, AA083131, AA083181, | |
| | NO: 521, b is an integer of 15 to 1169, where both a | AA083285, AA083293, AA147761, AA147804, AA155831, AA155741, AA430082, | |
| | and b correspond to the positions of nucleotide | AA581553, AA593886, AA594233, AA604399, AA576339, AA715836, AA730946, | |
| | residues shown in SEQ ID NO: 521, and where b is | AA737298, AA768251, AA872423, AA888276, AA961744, AA962699, AA975874, | |
| | greater than or equal to a + 14. | AI000132, R29417, AA640954, AA094702, AA398483, AA402600, AA489817, | |
| | | AA489948, AA496290, AA663953, AA663986, AA725581, AA771972, AA781165, | |
| | | AA845829, AA772618, AA773208, AA907551, AI003883, AI004593, AI031669, | |
| | | AI052123, AI085380 | |
| 841148 | Preferably excluded from the present invention are | | |
| | one or more polynucleotides comprising a nucleotide | | |
| | sequence described by the general formula of a − b, | | |
| | where a is any integer between 1 to 2148 of SEQ ID | | |
| | NO: 522, b is an integer of 15 to 2162, where both a | | |
| | and b correspond to the positions of nucleotide | | |
| | residues shown in SEQ ID NO: 522, and where b is | | |
| | greater than or equal to a + 14. | | |
| 841149 | Preferably excluded from the present invention are | A812937 | |
| | one or more polynucleotides comprising a nucleotide | | |
| | sequence described by the general formula of a − b, | | |
| | where a is any integer between 1 to 785 of SEQ ID | | |
| | NO: 523, b is an integer of 15 to 799, where both a and | | |
| | b correspond to the positions of nucleotide residues | | |
| | shown in SEQ ID NO: 523, and where b is greater than | | |
| | or equal to a + 14. | | |
| 841151 | Preferably excluded from the present invention are | | |
| | one or more polynucleotides comprising a nucleotide | | |
| | sequence described by the general formula of a − b, | | |
| | where a is any integer between 1 to 1708 of SEQ ID | | |
| | NO: 524, b is an integer of 15 to 1722, where both a | | |
| | and b correspond to the positions of nucleotide | | |
| | residues shown in SEQ ID NO: 524, and where b is | | |
| | greater than or equal to a + 14. | | |
| 841155 | Preferably excluded from the present invention are | | |
| | one or more polynucleotides comprising a nucleotide | | |
| | sequence described by the general formula of a − b, | | |
| | where a is any integer between 1 to 548 of SEQ ID | | |
| | NO: 525, b is an integer of 15 to 562, where both a and | | |
| | correspond to the positions of nucleotide residues | | |
| | shown in SEQ ID NO: 525, and where b is greater than | | |
| | or equal to a + 14. | | |
| 841161 | Preferably excluded from the present invention are | H81836, AA015599, AA099033, AA099034, AA21 1818, AA741499, AA748367, | |
| | one or more polynucleotides comprising a nucleotide | AA768854, AA805297, AA804217, AI000120, AI090415, D79280, D79875, AA628397, | |
| | sequence described by the general formula of a − b, | AA628438, AA889584, Z36757 | |
| | where a is any integer between 1 to 2009 of SEQ ID | | |
| | NO: 526, b is an integer of 15 to 2023, where both a | | |
| | and b correspond to the positions of nucleotide | | |
| | residues shown in SEQ ID NO: 526, and where b is | | |
| | greater than or equal to a + 14. | | |
| 841162 | Preferably excluded from the present invention are | T54529, T54568, T39916, T40885, T64421, T64740, T94433, T94519, T94763, T94764, | |
| | one or more polynucleotides comprising a nucleotide | T67443, T67536, T69533, R08782, R08783, T84049, T86084, R18023, R19657, R33054, | |
| | sequence described by the general formula of a − b, | R33948, R52119, R52216, R53248, R53249, R71311, H04393, H04418, H23196, | |
| | where a is any integer between 1 to 2833 of SEQ ID | H23309, H47118, R95161, H54791, H54843, H66487, H66488, H87522, H87523, | |
| | NO: 527, b is an integer of 15 to 2847, where both a | H92220, H97204, H97637, H98041, N25008, N27036, N32850, N32940, N41677, | |
| | and b correspond to the positions of nucleotide | N41803, N52911, N55243, N55603, N59425, N62367, N67146, N67527, N68040, | |
| | residues shown in SEQ ID NO: 527, and where b is | N68109, N69439, N79136, W03264, W02511, W16533, W16511, W16949, W19590, | |
| | greater than or equal to a + 14. | W20032, W25683, W56022, W57870, W58141, W84752, W84757, W96458, W96558, | |
| | | N89892, N91494, AA035714, AA040577, AA040675, AA043889, AA052991, | |
| | | AA053277, AA053702, AA062923, AA063530, AA074314, AA074909, AA074744, | |
| | | AA076274, AA098982, AA099025, AA146894, AA146893, AA160127, AA160126, | |
| | | AA160195, AA160196, AA169764, AA169385, AA179301, AA223348, AA233558, | |
| | | AA235471, AA460676, AA420533, AA506563, AA523418, AA527621, AA528362, | |
| | | AA531060, AA532619, AA541282, AA552184, AA564466, AA564790, H98795, | |
| | | AA583450, AA613483, AA622733, AA627809, AA577550, AA578980, AA579413, | |
| | | AA714153, AA721494, AA721786, AA737104, AA738062, AA745852, AA746662, | |
| | | AA748113, AA814512, AA814515, AA848156, AA858182, AA877787, AA886219, | |
| | | AA886814, AA908510, AA919073, AA953828, AA971838, AA974669, AA974937, | |
| | | AA975070, AA978156, AA985412, AA985429, AA989103, AA989168, AA975750, | |
| | | AI053418, AI053736, AI053892, AI053967, AI053988, AI054073, AI054111, F18748, | |
| | | AI096767, W16689, F17979, W26593, W74635, R29761, AA090571, AA090284, | |
| | | AA092279, AA092676, AA174176, AA206002, AA206857, AA206939, AA204847, | |
| | | AA204862, AA205665, AA205777, C17805, AA215924, AA284942, AA285094, | |
| | | AA292514, AA293872, AA398296, AA401676, AA412021, AA450108, AA450173, | |
| | | AA477960, AA478675, AA479216, AA482218, AA608548, AA634838, AA634910, | |
| | | AA634951, AA644321, AA664196, AA665979, AA668238, AA668579, AA669764, | |
| | | AA669856, AA676279, AA630300, Z20366, AA716371, AA716380, Z19906, | |
| | | AA777040, AA778451, AA781061, AA845834, T25435, Z21568, AA772588, | |
| | | AA917780, AI003327, AI016140, AI024969, AI032559, AI056850, AI088269, | |
| | | AI090536, AI092597, AI093387, T15364, D29035, T27400, T27473, F02321, F06069, | |
| | | T69476, AA773898, AA694154 | |
| 841163 | Preferably excluded from the present invention are | T70512, W58177, W58266, AA027003, AA047260, AA057146, AA076110, AA150122, | |
| | ne or more polynucleotides comprising a nucleotide | AA150030, AA424246, AA425670, AA523788, AA554661, AA582491, AA587000, | |
| | sequence described by the general formula of a − b, | AA633476, AA578397, AA662364, AA687611, AA729856, AA741041, AA806947, | |
| | where a is any integer between 1 to 802 of SEQ ID | AA894899, AA922687, AA934486, AA946779, AA954606, AA962108, AA988276, | |
| | NO: 528, b is an integer of 15 to 816, where both a and | AI054171, AA436000, AA436099, AA442324, AA45 1996, AA722958, AA780203, | |
| | correspond to the positions of nucleotide residues | T25797, AI018410, AI024726, AI074321 | |
| | shown in SEQ ID NO: 528, and where b is greater than | | |
| | or equal to a + 14. | | |
| 841169 | Preferably excluded from the present invention are | | |
| | one or more polynucleotides comprising a nucleotide | | |
| | sequence described by the general formula of a − b, | | |
| | where a is any integer between 1 to 871 of SEQ ID | | |
| | NO: 529, b is an integer of 15 to 885, where both a and | | |
| | b correspond to the positions of nucleotide residues | | |
| | shown in SEQ ID NO: 529, and where b is greater than | | |
| | or equal to a + 14. | | |
| 841172 | Preferably excluded from the present invention are | T47968, H14181, H26893, N40884, Z42735 | |
| | one or more polynucleotides comprising a nucleotide | | |
| | sequence described by the general formula of a − b, | | |
| | where a is any integer between 1 to 728 of SEQ ID | | |
| | NO: 530, b is an integer of 15 to 742, where both a and | | |
| | b correspond to the positions of nucleotide residues | | |
| | shown in SEQ ID NO: 530, and where b is greater than | | |
| | or equal to a + 14. | | |
| 841174 | Preferably excluded from the present invention are | | |
| | one or more polynucleotides comprising a nucleotide | | |
| | sequence described by the general formula of a − b, | | |
| | where a is any integer between 1 to 511 of SEQ ID | | |
| | NO: 531, b is an integer of 15 to 525, where both a and | | |
| | b correspond to the positions of nucleotide residues | | |
| | shown in SEQ ID NO: 531, and where b is greater than | | |
| | or equal to a + 14. | | |
| 841179 | Preferably excluded from the present invention are | | |
| | one or more polynucleotides comprising a nucleotide | | |
| | sequence described by the general formula of a − b, | | |
| | where a is any integer between 1 to 1911 of SEQ ID | | |
| | NO: 532, b is an integer of 15 to 1925, where both a | | |
| | and b correspond to the positions of nucleotide | | |
| | residues shown in SEQ ID NO: 532, and where b is | | |
| | greater than or equal to a + 14. | | |
| 841183 | Preferably excluded from the present invention are | | |
| | one or more polynucleotides comprising a nucleotide | | |
| | sequence described by the general formula of a − b, | | |
| | where a is any integer between 1 to 488 of SEQ ID | | |
| | NO: 533, b is an integer of 15 to 502, where both a and | | |
| | b correspond to the positions of nucleotide residues | | |
| | shown in SEQ ID NO: 533, and where b is greater than | | |
| | or equal to a + 14. | | |
| 841186 | Preferably excluded from the present invention are | | |
| | one or more polynucleotides comprising a nucleotide | | |
| | sequence described by the general formula of a − b, | | |
| | where a is any integer between 1 to 1786 of SEQ ID | | |
| | NO: 534, b is an integer of 15 to 1800, where both a | | |
| | and b correspond to the positions of nucleotide | | |
| | residues shown in SEQ ID NO: 534, and where b is | | |
| | greater than or equal to a + 14. | | |
| 841204 | Preferably excluded from the present invention are | | |
| | one or more polynucleotides comprising a nucleotide | | |
| | sequence described by the general formula of a − b, | | |
| | where a is any integer between 1 to 2483 of SEQ ID | | |
| | NO: 535, b is an integer of 15 to 2497, where both a | | |
| | and b correspond to the positions of nucleotide | | |
| | residues shown in SEQ ID NO: 535, and where b is | | |
| | greater than or equal to a + 14. | | |
| 841206 | Preferably excluded from the present invention are | | |
| | one or more polynucleotides comprising a nucleotide | | |
| | sequence described by the general formula of a − b, | | |
| | where a is any integer between 1 to 4076 of SEQ ID | | |
| | NO: 536, b is an integer of 15 to 4090, where both a | | |
| | and b correspond to the positions of nucleotide | | |
| | residues shown in SEQ ID NO: 536, and where b is | | |
| | greater than or equal to a + 14. | | |
| 841207 | Preferably excluded from the present invention are | AA215286 | |
| | one or more polynucleotides comprising a nucleotide | | |
| | sequence described by the general formula of a − b, | | |
| | where a is any integer between 1 to 572 of SEQ ID | | |
| | NO: 537, b is an integer of 15 to 586, where both a and | | |
| | b correspond to the positions of nucleotide residues | | |
| | shown in SEQ ID NO: 537, and where b is greater than | | |
| | or equal to a + 14. | | |
| 841211 | Preferably excluded from the present invention are | | |
| | one or more polynucleotides comprising a nucleotide | | |
| | sequence described by the general formula of a − b, | | |
| | where a is any integer between 1 to 1236 of SEQ ID | | |
| | NO: 538, b is an integer of 15 to 1250, where both a | | |
| | and b correspond to the positions of nucleotide | | |
| | residues shown in SEQ ID NO: 538, and where b is | | |
| | greater than or equal to a + 14. | | |
| 841225 | Preferably excluded from the present invention are | | |
| | one or more polynucleotides comprising a nucleotide | | |
| | sequence described by the general formula of a − b, | | |
| | where a is any integer between 1 to 1336 of SEQ ID | | |
| | NO: 539, b is an integer of 15 to 1350, where both a | | |
| | and b correspond to the positions of nucleotide | | |
| | residues shown in SEQ ID NO: 539, and where b is | | |
| | greater than or equal to a + 14. | | |
| 841229 | Preferably excluded from the present invention are | | |
| | one or more polynucleotides comprising a nucleotide | | |
| | sequence described by the general formula of a − b, | | |
| | where a is any integer between 1 to 2495 of SEQ ID | | |
| | NO: 540, b is an integer of 15 to 2509, where both a | | |
| | and b correspond to the positions of nucleotide | | |
| | residues shown in SEQ ID NO: 540, and where b is | | |
| | greater than or equal to a + 14. | | |
| 841237 | Preferably excluded from the present invention are | H39746, H38765, H53680, H84385, H84386, H95751, H96427, H96428, N22709, | |
| | one or more polynucleotides comprising a nucleotide | N24033, N27417, N27531, N31183, N34699, N35427, N40348, N46995, N47385, | |
| | sequence described by the general formula of a − b, | W47664, W52613, W58021, AA020909, AA032219, AA032277, AA036745, AA053732, | |
| | where a is any integer between 1 to 1729 of SEQ ID | AA055872, AA057318, AA062713, AA070398, AA134055, AA132315, AA132625, | |
| | NO: 541, b is an integer of 15 to 1743, where both a | AA149601, AA149602, AA494458, AA516430, AA534386, AA582804, AA581987, | |
| | and b correspond to the positions of nucleotide | AA588838, AA631158, AA635970, AA577392, AA577494, AA857008, AA894813, | |
| | residues shown in SEQ ID NO: 541, and where b is | AA933084, A1000994, N47386, D11495, D11593, D12071, D11877, D11882, D11902, | |
| | greater than or equal to a + 14. | AA456436, AA683214, AA890528. AA983938, AI074406, AI084728 | |
| 841241 | Preferably excluded from the present invention are | T64820, R18486, R48571, R48670, R51358, R51464, R70428, R71854, R77389, R77390, | |
| | one or more polynucleotides comprising a nucleotide | H18251, H18293, H18401, H18402, H19764, H19765, H21210, H21526, H24560, | |
| | sequence described by the general formula of a − b, | H25150, H26985, H28104, H30240, H30297, H30868, H30871, H40890, H41878, | |
| | where a is any integer between 1 to 2196 of SEQ ID | H41879, H43721, H43811, H43814, R84543, R85932, R87323, R93828, H49042, | |
| | NO: 542, b is an integer of 15 to 2210, where both a | H49101, H51175, H51188, H68511, H75818, H80551, H80607, N41005, N45017, | |
| | and b correspond to the positions of nucleotide | N56601, N70611, N74891, N93043, N93044, N94350, N98497, W04932, W21511, | |
| | residues shown in SEQ ID NO: 542, and where b is | W21512, W24020, W31043, W47411, W47607, W47659, W47660, W48851, W48618, | |
| | greater than or equal to a + 14. | W52281, W56619, W56649, W68334, W68375, W70156, W70195, W84467, W84552, | |
| | | W90400, W94826, W96342, W96343, N91167, AA016293, AA017674, AA025151, | |
| | | AA025152, AA027955, AA031264, AA031395, AA031855, AA031854, AA035782, | |
| | | AA037318, AA040025, AA056359, AA069269, AA069418, AA069509, AA101608, | |
| | | AA114873, AA114837, AA115697, AA133516, AA220968, AA458530, AA460966, | |
| | | AA463596, AA419091, AA428836, AA507951, AA582836, AA640114, AA659114, | |
| | | AA836669, AA903136, AA903220, AA918099, AA928492, AA971856, AA973427, | |
| | | AA994099, AI016016, AI057267, AA069497, AA206877, AA218868, AA284783, | |
| | | AA284712, AA293434, AA293042, AA402851, AA454608, AA496283, AA609652, | |
| | | AA708123, AA757619, AA757695, AA774425, AA774630, AA775465, AA852435, | |
| | | AA852436, AA852604, AA852605, AA868271, AA884190, T03362, AI042345, | |
| | | AI042606, AI066399, AI086541, AI086967, AI091380, AI091725, AI092820, AI092945, | |
| | | | T23722, F03416, F04814, F07127, F08608, F12341 |
| 841259 | Preferably excluded from the present invention are | | |
| | one or more polynucleotides comprising a nucleotide | | |
| | sequence described by the general formula of a − b, | | |
| | where a is any integer between 1 to 1701 of SEQ ID | | |
| | NO: 543, b is an integer of 15 to 1715, where both a | | |
| | and b correspond to the positions of nucleotide | | |
| | residues shown in SEQ ID NO: 543, and where b is | | |
| | greater than or equal to a + 14. | | |
| 841260 | Preferably excluded from the present invention are | T93673, R01175, R01287, R72262, R72263, H53584, H53905, N57686, N59657, | |
| | one or more polynucleotides comprising a nucleotide | N63715, N98804, W86302, W86653, W87312, AA055614, AA058962, AA058961, | |
| | sequence described by the general formula of a − b, | AA149239, AA180323, AA460554, AA460555, AA492261, AA596073, AA604012, | |
| | where a is any integer between 1 to 3095 of SEQ ID | AA612811, AA617927, AA631804, AA767954, AA769298, AA804811, AA814647, | |
| | NO: 544, b is an integer of 15 to 3109, where both a | AA833776, AA872768, AA873458, AA876551, AA886069, AA932445, AA976417, | |
| | and b correspond to the positions of nucleotide | AA989268, AI055853, D80933, AI088938, AI096484, AA215901, AA393250, | |
| | residues shown in SEQ ID NO: 544, and where b is | AA435612, AA449044, AA449758, AA653318, AA678103, AA678744, AA705036, | |
| | greater than or equal to a + 14. | AA854081, AA789188, AA813062, AA868902, AI023192, AI033456, AI090508, | |
| | | Z28555, T25877, D30980, D31048, D31377, F00724, AA682530, AA694353 | |
| 841264 | Preferably excluded from the present invention are | | |
| | one or more polynucleotides comprising a nucleotide | | |
| | sequence described by the general formula of a − b, | | |
| | where a is any integer between 1 to 1162 of SEQ ID | | |
| | NO: 545, b is an integer of 15 to 1176, where both a | | |
| | and b correspond to the positions of nucleotide | | |
| | residues shown n SEQ ID NO: 545, and where b is | | |
| | greater than or equal to a + 14. | | |
| 841275 | Preferably excluded from the present invention are | | |
| | one or more polynucleotides comprising a nucleotide | | |
| | sequence described by the general formula of a − b, | | |
| | where a is any integer between 1 to 1721 of SEQ ID | | |
| | NO: 546, b is an integer of 15 to 1735, where both a | | |
| | and b correspond to the positions of nucleotide | | |
| | residues shown in SEQ ID NO: 546, and where b is | | |
| | greater than or equal to a + 14. | | |
| 841311 | Preferably excluded from the present invention are | | |
| | one or more polynucleotides comprising a nucleotide | | |
| | sequence described by the general formula of a − b, | | |
| | where a is any integer between 1 to 1034 of SEQ ID | | |
| | NO: 547, b is an integer of 15 to 1048, where both a | | |
| | and b correspond to the positions of nucleotide | | |
| | residues shown in SEQ ID NO: 547, and where b is | | |
| | greater than or equal to a + 14. | | |
| 841313 | Preferably excluded from the present invention are | | |
| | one or more polynucleotides comprising a nucleotide | | |
| | sequence described by the general formula of a − b, | | |
| | where a is any integer between 1 to 722 of SEQ ID | | |
| | NO: 548, b is an integer of 15 to 736, where both a and | | |
| | b correspond to the positions of nucleotide residues | | |
| | shown in SEQ ID NO: 548, and where b is greater than | | |
| | or equal to a + 14. | | |
| 841317 | Preferably excluded from the present invention are | T78127, R31279, R31890, R38014, R68187, R68186, R68960, R81444, R81647, | |
| | one or more polynucleotides comprising a nucleotide | H03085, H42975, N2228, N35405, N40226, N52138, N66461, N66470, W48764, | |
| | sequence described by the general formula of a − b, | W49783, W58388, AA044222, AA044341, AA131687, AA131731, AA224224, | |
| | where a is any integer between 1 to 2217 of SEQ ID | AA224527, AA469092, AA580878, AA573581, AA863153, AA903745, AA971415, | |
| | NO: 549, b is an integer of 15 to 2231, where both a | C03879, AA249392, AA448556, AA449703, F2605, AA723322, AA904943, Z18868, | |
| | and b correspond to the positions of nucleotide | AA971554, AA991799, AI015846, AI037913, AI056007, AI082497, AI090170, | |
| | residues shown in SEQ ID NO: 549, and where b is | AI095394 | |
| | greater than or equal to a + 14. | | |
| 841322 | Preferably excluded from the present invention are | R21970, R83459, H65911, W76286, AA182592, AA281797, AA281874, AA291943, | |
| | one or more polynucleotides comprising a nucleotide | H65824, AA580660, AA748474, AA829390, AA293389, AA401755, AA910004, | |
| | sequence described by the general formula of a − b, | AA994494, AI005165, AI081877 | |
| | where a is any integer between 1 to 1802 of SEQ ID | | |
| | NO: 550, b is an integer of 15 to 1816, where both a | | |
| | and b corresond to the positions of nucleotide | | |
| | residues shown in SEQ ID NO: 550, and where b is | | |
| | greater than or equal to a + 14. | | |
| 841331 | Preferably excluded from the present invention are | | |
| | one or more polynucleotides comprising a nucleotide | | |
| | sequence described by the general formula of a − b, | | |
| | where a is any integer between 1 to 2596 of SEQ ID | | |
| | NO: 551, b is an integer of 15 to 2610, where both a | | |
| | and b correspond to the positions of nucleotide | | |
| | residues shown in SEQ ID NO: 551, and where b is | | |
| | greater than or equal to a + 14. | | |
| 841332 | Preferably excluded from the present invention are | | |
| | one or more polynucleotides comprising a nucleotide | | |
| | sequence described by the general formula of a − b, | | |
| | where a is any integer between 1 to 4007 of SEQ ID | | |
| | NO: 552, b is an integer of 15 to 4021, where both a | | |
| | and b correspond to the positions of nucleotide | | |
| | residues shown in SEQ ID NO: 552, and where b is | | |
| | greater than or equal to a + 14. | | |
| 841338 | Preferably excluded from the present invention are | | |
| | one or more polynucleotides comprising a nucleotide | | |
| | sequence described by the general formula of a − b, | | |
| | where a is any integer between 1 to 1766 of SEQ ID | | |
| | NO: 553, b is an integer of 15 to 1780, where both a | | |
| | and b correspond to the positions of nucleotide | | |
| | residues shown in SEQ ID NO: 553, and where b is | | |
| | greater than or equal to a + 14. | | |
| 841345 | Preferably excluded from the present invention are | | |
| | one or more polynucleotides comprising a nucleotide | | |
| | sequence described by the general formula of a − b, | | |
| | where a is any integer between 1 to 3699 of SEQ ID | | |
| | NO: 554, b is an integer of 15 to 3713, where both a | | |
| | and b correspond to the positions of nucleotide | | |
| | residues shown in SEQ ID NO: 554, and where b is | | |
| | greater than or equal to a + 14. | | |
| 841349 | Preferably excluded from the present invention are | | |
| | one or more polynucleotides comprising a nucleotide | | |
| | sequence described by the general formula of a − b, | | |
| | where a is any integer between 1 to 1983 of SEQ ID | | |
| | NO: 555, b is an integer of 15 to 1997, where both a | | |
| | and b correspond to the positions of nucleotide | | |
| | residues shown in SEQ ID NO: 555, and where b is | | |
| | greater than or equal to a + 14. | | |
| 841355 | Preferably excluded from the present invention are | | |
| | one or more polynucleotides comprising a nucleotide | | |
| | sequence described by the general formula of a − b, | | |
| | where a is any integer between 1 to 892 of SEQ ID | | |
| | NO: 556, b is an integer of 15 to 906, where both a and | | |
| | b correspond to the positions of nucleotide residues | | |
| | shown in SEQ ID NO: 556, and where b is greater than | | |
| | or equal to a + 14. | | |
| 841418 | Preferably excluded from the present invention are | | |
| | one or more polynucleotides comprising a nucleotide | | |
| | sequence described by the general formula of a − b, | | |
| | where a is any integer between 1 to 3470 of SEQ ID | | |
| | NO: 557, b is an integer of 15 to 3484, where both a | | |
| | and b correspond to the positions of nucleotide | | |
| | residues shown in SEQ ID NO: 557, and where b is | | |
| | greater than or equal to a + 14. | | |
| 841548 | Preferably excluded from the present invention are | AA223588 | |
| | one or more polynucleotides comprising a nucleotide | | |
| | sequence described by the general formula of a − b, | | |
| | where a is any integer between 1 to 776 of SEQ ID | | |
| | NO: 558, b is an integer of 15 to 790, where both a and | | |
| | b correspond to the positions of nucleotide residues | | |
| | shown in SEQ ID NO: 558, and where b is greater than | | |
| | or equal to a + 14. | | |
| 841632 | Preferably excluded from the present invention are | | |
| | one or more polynucleotides comprising a nucleotide | | |
| | sequence described by the general formula of a − b, | | |
| | where a is any integer between 1 to 544 of SEQ ID | | |
| | NO: 559, b is an integer of 15 to 558, where both a and | | |
| | b correspond to the position of nucleotide residues | | |
| | shown in SEQ ID NO: 559, and where b is greater than | | |
| | or equal to a + 14. | | |
| 841662 | Preferably excluded from the present invention are | H15850, H99706, N78646, W74702, W94916, AA809695 | |
| | one or more polynucleotides comprising a nucleotide | | |
| | sequence described by the general formula of a − b, | | |
| | where a is any integer between 1 to 520 of SEQ ID | | |
| | NO: 560, b is an integer of 15 to 534, where both a and | | |
| | b correspond to the positions of nucleotide residues | | |
| | shown in SEQ ID NO: 560, and where b is greater than | | |
| | or equal to a + 14. | | |
| 841771 | Preferably excluded from the present invention are | T50029, T67900, T74699, T74819, T88802, T81298, T84439, T95656, R06092, R06196, | |
| | one or more polynucleotides comprising a nucleotide | R14563, R14966, R14970, R16465, R38948, R40957, R40957, R63975, R64085, | |
| | sequence described by the general formula of a − b, | R66362, R66363, R67505, H17644, H17758, R92097, H48240, H48331, H49625, | |
| | where a is any integer between 1 to 3029 of SEQ ID | H49715, H61167, H62068, H69147, N25753, N36472, N69035, N71493, N92970, | |
| | NO: 561, b is an integer of 15 to 3043, where both a | N98567, N99536, W00665, W24251, W40582, W45462, W35538, W45525, W45687, | |
| | and b correspond to the positions of nucleotide | W44315, W57971, W57944, W70012, W70013, W86733, AA044684, AA071192, | |
| | residues shown in SEQ ID NO: 561, and where b is | AA01799, AA190325, AA191520, AA533197, AA558210, AA581106, AA581161, | |
| | greater than or equal to a + 14. | AA577119, AA857551, AA878885, AA936839, AA975697, D78980, W28535, C02075, | |
| | | C17857 | |
| 841827 | Preferably excluded from the present invention are | | |
| | one or more polynucleotides comprising a nucleotide | | |
| | sequence described by the general formula of a − b, | | |
| | where a is any integer between 1 to 1372 of SEQ ID | | |
| | NO: 562, b is an integer of 15 to 1386, where both a | | |
| | and b correspond to the positions of nucleotide | | |
| | residues shown in SEQ ID NO: 562, and where b is | | |
| | greater than or equal to a + 14. | | |
| 841835 | Preferably excluded from the present invention are | | |
| | one or more polynucleotides comprising a nucleotide | | |
| | sequence described by the general formula of a − b, | | |
| | where a is any integer between 1 to 2624 of SEQ ID | | |
| | NO: 563, b is an integer of 15 to 2638, where both a | | |
| | and b correspond to the positions of nucleotide | | |
| | residues shown in SEQ ID NO: 563, and where b is | | |
| | greater than or equal to a + 14. | | |
| 842259 | Preferably escluded from the present invention are | | |
| | one or more polynucleotides comprising a nucleotide | | |
| | sequence described by the general formula of a − b, | | |
| | where a is any integer between 1 to 677 of SEQ ID | | |
| | NO: 564, b is an integer of 15 to 691, where both a and | | |
| | b correspond to the positions of nucleotide residues | | |
| | shown in SEQ ID NO: 564, and where b is greater than | | |
| | or equal to a + 14. | | |
| 842463 | Preferably excluded from the present invention are | | |
| | one or more polynucleotides comprising a nucleotide | | |
| | sequence described by the general formula of a − b, | | |
| | where a is any integer between 1 to 1953 of SEQ ID | | |
| | NO: 565, b is an integer of 15 to 1967, where both a | | |
| | and b correspond to the positions of nucleotide | | |
| | residues shown in SEQ ID NO: 565, and where b is | | |
| | greater than or equal to a + 14. | | |
| 842595 | Preferably excluded from the present invention are | | |
| | one or more polynucleotides comprising a nucleotide | | |
| | sequence described by the general formula of a − b, | | |
| | where a is any integer between 1 to 1320 of SEQ ID | | |
| | NO: 566, b is an integer of 15 to 1334, where both a | | |
| | and b correspond to the positions of nucleotide | | |
| | residues shown in SEQ ID NO: 566, and where b is | | |
| | greater than or equal to a + 14. | | |
| 842722 | Preferably excluded from the present invention are | | |
| | one or more polynucleotides comprising a nucleotide | | |
| | sequence described by the general formula of a − b, | | |
| | where a is any integer between 1 to 1596 of SEQ ID | | |
| | NO: 567, ab is an integer of 15 to 1610, where both a | | |
| | and b correspond to the positions of nucleotide | | |
| | residues shown in SEQ ID NO: 567, and where b is | | |
| | greater than or equal to a + 14. | | |
| 842815 | Preferably excluded from the present invention are | | |
| | one or more polynucleotides comprising a nucleotide | | |
| | sequence described by the general formula of a − b, | | |
| | where a is any integer between 1 to 1398 of SEQ ID | | |
| | NO: 568, b is an integer of 15 to 1412, where both a | | |
| | and b correspond to the positions of nucleotide | | |
| | residues shown in SEQ ID NO: 568, and where b is | | |
| | greater than or equal to a + 14. | | |
| 842818 | Preferably excluded from the present invention are | | |
| | one or more polynucleotides comprising a nucleotide | | |
| | sequence described by the general formula of a − b, | | |
| | where a is any integer between 1 to 1111 of SEQ ID | | |
| | NO: 569, b is an integer of 15 to 1125, where both a | | |
| | and b correspond to the positions of nucleotide | | |
| | residues shown in SEQ ID NO: 569, and where b is | | |
| | greater than or equal to a + 14. | | |
| 843251 | Preferably excluded from the present invention are | | |
| | one or more polynucleotides comprising a nucleotide | | |
| | sequence described by the general formula of a − b, | | |
| | where a is any integer between 1 to 1902 of SEQ ID | | |
| | NO: 570, b is an integer of 15 to 1916, where both a | | |
| | and b correspond to the positions of nucleotide | | |
| | residues shown in SEQ ID NO: 570, and where b is | | |
| | greater than or equal to a + 14. | | |
| 83422 | Preferably excluded from the present invention are | | |
| | one or more polynucleotides comprising a nucleotide | | |
| | sequence described by the general formula of a − b, | | |
| | where a is any integer between 1 to 1239 of SEQ ID | | |
| | NO: 571, ab is an integer of 15 to 1253, where both a | | |
| | and b correspond to the positions of nucleotide | | |
| | residues shown in SEQ ID NO: 571, and where b is | | |
| | greater than or equal to a + 14. | | |
| 843784 | Preferably excluded from the present invention are | | |
| | one or more polynucleotides comprising a nucleotide | | |
| | sequence described by the general formula of a − b, | | |
| | where a is any integer between 1 to 1999 of SEQ ID | | |
| | NO: 572, b is an integer of 15 to 2013, where both a | | |
| | and b correspond to the positions of nucleotide | | |
| | residues shown in SEQ ID NO: 572, and where b is | | |
| | greater than or equal to a + 14. | | |
| 844017 | Preferably excluded from the present invention are | AA075932 | |
| | one or more polynucleotides comprising a nucleotide | | |
| | sequence described by the general formula of a − b, | | |
| | where a is any integer between 1 to 655 of SEQ ID | | |
| | NO: 573, b is an integer of 15 to 669, where both a and | | |
| | b correspond to the positions of nucleotide residues | | |
| | shown in SEQ ID NO: 573, and where b is greater than | | |
| | or equal to a + 14. | | |
| 844138 | Preferably excluded from the present invention are | T54096, T54187, T54360, T39143, T40432, T90493, T90589, T89428, T89794, T80000, | |
| | one or more polynucleotides comprising a nucleotide | R00221, R00327, R25952, R26450, R26761, R28549, R55293, R55390, R73233, | |
| | sequence described by the general formula of a − b, | H42630, H44454, H44498, R83525, R86282, H85785, N33586, N34419, N36244, | |
| | where a is any integer between 1 to 2418 of SEQ ID | N48653, N49430, W51915, AA05530, AA055939, AA069732, AA100817, AA122084, | |
| | NO: 574, b is an integer of 15 to 2432, where both a | AA121407, AA126332, AA133329, AA134151, AA134152, AA134714, AA136470, | |
| | and b correspond to the positions of nucleotide | AA136960, AA157850, AA157906, AA157976, AA159365, AA171854, AA187219, | |
| | residues shown in SEQ ID NO: 574, and where b is | AA186342, AA250818, AA464565, AA464666, AA428826, AA429361, AA491863, | |
| | greater than or equal to a + 14. | AA505512, AA524490, AA558038, AA581979, AA588712, AA583885, AA601110, | |
| | | AA573930, AA577156, AA578735, AA689159, AA730155, AA768486, AA805061, | |
| | | AA826981, AA865985, AA931167, AA947324, AA953202, AA961105, AA962413, | |
| | | AA976440, AA977760, AI032134, AI053415, AI053575, AI054013, AI054146, | |
| | | AI054281, U46376, W22126, C00371, C05283, AA641416, AA643346, AA292261, | |
| | | AA421818, AA496452, AA496521, AA653437, AA664399, AA680123, AA431832, | |
| | | AA434143, AA678582, AA705952, AA679763, AA733019, AA781645, AA813232, | |
| | | AA833597, AA844624, AI024151, AI038232, AI042551, AI080152, AI086490, T24101, | |
| | | F03522, F07244 | |
| 844166 | Preferably excluded from the present invention are | | |
| | one or more polynucleotides comprising a nucleotide | | |
| | sequence described by the general formula of a − b, | | |
| | where a is any integer between 1 to 1358 of SEQ ID | | |
| | NO: 575, b is an integer of 15 to 1372, where both a | | |
| | and bo correspond to the positions of nucleotide | | |
| | residues shown in SEQ ID NO: 575, and where b is | | |
| | greater than or equal to a + 14. | | |
| 844194 | Preferably excluded from the present invention are | | |
| | one or more polynucleotides comprising a nucleotide | | |
| | sequence described by the general formula of a − b, | | |
| | where a is any integer between 1 to 2006 of SEQ ID | | |
| | NO: 576, ab is an integer of 15 to 2020, where both a | | |
| | and b correspond to the positions of nucleotide | | |
| | residues shown in SEQ ID NO: 576, and where b is | | |
| | greater than or equal to a + 14. | | |
| 844394 | Preferably excluded from the present invention are | | |
| | one or more polynucleotides comprising a nucleotide | | |
| | sequence described by the general formula of a − b, | | |
| | where a is any integer between 1 to 3147 of SEQ ID | | |
| | NO: 577, ab is an integer of 15 to 3161, where both a | | |
| | and b correspond to the positions of nucleotide | | |
| | residues shown in SEQ ID NO: 577, and where b is | | |
| | greater than or equal to a + 14. | | |
| 844450 | Preferably excluded from the present invention are | | |
| | one or more polynucleotides comprising a nucleotide | | |
| | sequence described by the general formula of a − b, | | |
| | where a is any integer between 1 to 2032 of SEQ ID | | |
| | NO: 578, b is an integer of 15 to 2046, where both a | | |
| | and b correspond to the positions of nucleotide | | |
| | residues shown in SEQ ID NO: 578, and where b is | | |
| | greater than equal to a + 14. | | |
| 844534 | Preferably excluded from the present invention are | | |
| | one or more polynucleotides comprising a nucleotide | | |
| | sequence described by the general formula of a − b, | | |
| | where a is any integer between 1 to 288 of SEQ ID | | |
| | NO: 579, ab is an integer of 15 to 302, where both a and | | |
| | b correspond to the positions of nucleotide residues | | |
| | shown in SEQ ID NO: 579, and where b is greater than | | |
| | or equal to a + 14. | | |
| 844535 | Preferably excluded from the present invention are | | |
| | one or more polynucleotides comprising a nucleotide | | |
| | sequence described by the general formula of a − b, | | |
| | where a is any integer between 1 to 3053 of SEQ ID | | |
| | NO: 580, b is an integer of 15 to 3067, where both a | | |
| | and b correspond to the positions of nucleotide | | |
| | residues shown in SEQ ID NO: 580, and where b is | | |
| | greater than or equal to a + 14. | | |
| 844644 | Preferably excluded from the present invention are | | |
| | one or more olynucleotides comprising a nucleotide | | |
| | sequence described by the general formula of a − b, | | |
| | where a is any integer between 1 to 1560 of SEQ ID | | |
| | NO: 581, b is an integer of 15 to 1574, where both a | | |
| | and b correspond to the positions of nucleotide | | |
| | residues shown in SEQ ID NO: 581, and where b is | | |
| | greater than or equal to a + 14. | | |
| 844653 | Preferably excluded from the present invention are | | |
| | one or more polynucleotides comprising a nucleotide | | |
| | sequence described by the general formula of a − b, | | |
| | where a is any integer between 1 to 946 of SEQ ID | | |
| | NO: 582, b is an integer of 15 to 960, where both a and | | |
| | b correspond to the positions of nucleotide residues | | |
| | shown in SEQ ID NO: 582, and where b is greater than | | |
| | or equal to a + 14. | | |
| 844659 | Preferably excluded from the present invention are | | |
| | one or more polynucleotides comprising a nucleotide | | |
| | sequence described by the general formula of a − b, | | |
| | where a is any integer between 1 to 527 of SEQ ID | | |
| | NO: 583, b is an integer of 15 to 541, where both a and | | |
| | b correspond to the positions of nucleotide residues | | |
| | shown in SEQ ID NO: 583, and where b is greater than | | |
| | or equal to a + 14. | | |
| 844796 | Preferably excluded from the present invention are | | |
| | one or more polynucleotides comprising a nucleotide | | |
| | sequence described by the general formula of a − b, | | |
| | where a is any integer between 1 to 2954 of SEQ ID | | |
| | NO: 584, b is an integer of 15 to 2968, where both a | | |
| | and b correspond to the positions of nucleotide | | |
| | residues shown in SEQ ID NO: 584, and where b is | | |
| | greater than or equal to a + 14. | | |
| 844812 | Preferably excluded from the present invention are | | |
| | one or more polynucleotides comprising a nucleotide | | |
| | sequence described by the general formula of a − b, | | |
| | where a is any integer between 1 to 2594 of SEQ ID | | |
| | NO: 585, b is an integer of 15 to 2608, where both a | | |
| | and b correspond to the positions of nucleotide | | |
| | residues shown in SEQ ID NO: 585, and where b is | | |
| | greater than or equal to a + 14. | | |
| 844894 | Preferably excluded from the present invention are | | |
| | one or more polynucleotides comprising a nucleotide | | |
| | sequence described by the general formula of a − b, | | |
| | where a is any integer between 1 to 1879 of SEQ ID | | |
| | NO: 586, ab is an integer of 15 to 1893, where both a | | |
| | and b correspond to the positions of nucleotide | | |
| | residues shown in SEQ ID NO: 586, and where b is | | |
| | greater than or equal to a + 14. | | |
| 845361 | Preferably excluded from the present invention are | T93072, T93161, T69748, T70732, R01200, R01312, R05457, R05477, R05584, R43190, | |
| | one or more polynucleotides comprising a nucleotide | R43190, R65942, R75719, R78234, H03875, H03876, H15845, H16155, H17787, | |
| | sequence described by the general formula of a − b, | H40269, H45881, R84787, R92493, R92931, H58301, H58912, H58913, H62257, | |
| | where a is any integer between 1 to 2449 of SEQ ID | H67051, H68135, H81385, H83681, H91363, H96711, N20348, N22509, N27952, | |
| | NO: 587, b is an integer of 15 to 2463, where both a | N28616, N31997, N32005, N36007, N39356, N40718, N70011, N70094, N92576, | |
| | and b correspond to the positions of nucleotide | N99870, W00896, W00925, W04623, W25220, W31522, W37278, W37791, W38868, | |
| | residues shown in SEQ ID NO: 587, and where b is | W52654, W51751, AA017158, AA019458, AA022914, AA022915, AA037370, | |
| | greater than or equal to a + 14. | AA037502, AA045696, AA045697, AA046013, AA054565, AA054625, AA069778, | |
| | | AA079736, AA081087, AA081144, AA100055, AA100504, AA100334, AA115581, | |
| | | AA115554, AA126149, AA126373, AA133101, AA130558, AA136439, AA151673, | |
| | | AA151821, AA141822, AA159031, AA165200, AA165201, AA176477, AA176498, | |
| | | AA176771, AA176830, AA182601, AA176736, AA187943, AA188578, AA188675, | |
| | | AA190342, AA190343, AA195091, AA213662, AA213715, AA232222, AA426516, | |
| | | AA424760, AA483564, AA490859, AA491042, AA505249, AA507988, AA508858, | |
| | | AA513433, AA514771, AA514785, AA514980, AA527545, AA534100, AA554008, | |
| | | AA557148, AA584946, AA586481, AA587849, AA588781, AA593916, AA605049, | |
| | | AA604893, AA617650, AA568567, AA621979, AA627588, AA578585, AA578744, | |
| | | AA661910, AA729355, AA729902, AA736994, AA738388, AA740375, AA741213, | |
| | | AA760943, AA830401, AA834201, AA834208, AA834250, AA864864, AA888527, | |
| | | AA906940, AA922073, AA927272, AA931625, AA933055, AA932772, AA936861, | |
| | | AA938504, AA975187, AA977857, AA975594, AI000724, AI014600, AI017381, | |
| | | AI066441, D82733, U47688, N83708, N83790, N85010, W22533, W23255, N86314, | |
| | | N87393, N88971, AA642249, AA642903, AA090403, AA091011, AA095990, | |
| | | AA204824, AA204931, AA643262, AA648446, AA216706, AA219615, AA249170, | |
| | | C75338, AA599187, AA668746, AA670340, AA405611, AA405150, AA708635, | |
| | | AA716044, AA722076, AA722829, AA725716, AA781064, AA844379, AI037987, | |
| | | AI039577, AI078722, AI077655, AI080306, AI084320, AI085219, AI093296, AI093479, | |
| | | AI095168, AI095267, D29018, F02782, F06502, F00762, F00966 | |
| 845620 | Preferably excluded from the present invention are | | |
| | one or more polynucleotides comprising a nucleotide | | |
| | sequence described by the general formula of a − b, | | |
| | where a is any integer between 1 to 1931 of SEQ ID | | |
| | NO: 588, b is an integer of 15 to 1945, where both a | | |
| | and b correspond to the positions of nucleotide | | |
| | residues shown in SEQ ID NO: 588, and where b is | | |
| | greater than or equal to a + 14. | | |
| 845639 | Preferably excluded from the present invention are | | |
| | one or more polynucleotides comprising a nucleotide | | |
| | sequence described by the general formula of a − b, | | |
| | where a is any integer between 1 to 802 of SEQ ID | | |
| | NO: 589, b is an integer of 15 to 816, where both a and | | |
| | b correspond to the positions of nucleotide residues | | |
| | shown in SEQ ID NO: 589, and where b is greater than | | |
| | or equal to a + 14. | | |
| 845660 | Preferably excluded from the present invention are | | |
| | one or more polynucleotides comprising a nucleotide | | |
| | sequence described by the general formula of a − b, | | |
| | where a is any integer between 1 to 2293 of SEQ ID | | |
| | NO: 590, b is an integer of 15 to 2307, where both a | | |
| | and b correspond to the positions of nucleotide | | |
| | residues shown in SEQ ID NO: 590, and where b is | | |
| | greater than or equal to a + 14. | | |
| 845720 | Preferably excluded from the present invention are | | |
| | one or more polynucleotides comprising a nucleotide | | |
| | sequence described by the general formula of a − b, | | |
| | where a is any integer between 1 to 1424 of SEQ ID | | |
| | NO: 591, b is an integer of 15 to 1438, where both a | | |
| | and b correspond to the positions of nucleotide | | |
| | residues shown in SEQ ID NO: 591, and where b is | | |
| | greater than or equal to a + 14. | | |
| 845785 | Preferably escluded from the present invention are | | |
| | one or more polynucleotides comprising a nucleotide | | |
| | sequence described by the general formula of a − b, | | |
| | where a is any integer between 1 to 1064 of SEQ ID | | |
| | NO: 592, b is an integer of 15 to 1078, where both a | | |
| | and b correspond to the positions of nucleotide | | |
| | residues shown in SEQ ID NO: 592, and where b is | | |
| | greater than or equal to a + 14. | | |
| 845897 | Preferably excluded from the present invention are | | |
| | one or more polynucleotides comprising a nucleotide | | |
| | sequence described by the general formula of a − b, | | |
| | where a is any integer between 1 to 2478 of SEQ ID | | |
| | NO: 593, b is an integer of 15 to 2492, where both a | | |
| | and b correspond to the positions of nucleotide | | |
| | residues shown in SEQ ID NO: 593, and where b is | | |
| | greater than or equal to a + 14. | | |
| 845922 | Preferably excluded from the present invention are | | |
| | one or more polynucleotides comprising a nucleotide | | |
| | sequence described by the general formula of a − b, | | |
| | where a is any integer between 1 to 1890 of SEQ ID | | |
| | NO: 594, b is an integer of 15 to 1904, where both a | | |
| | and b correspond to the positions of nucleotide | | |
| | residues shown in SEQ ID NO: 594, and where b is | | |
| | greater than or equal to a + 14. | | |
| 846016 | Preferably excluded from the present invention are | | |
| | one or more polynucleotides comprising a nucleotide | | |
| | sequence described by the general formula of a − b, | | |
| | where a is any integer between 1 to 323 of SEQ ID | | |
| | NO: 595, b is an integer of 15 to 337, where both a and | | |
| | b correspond to the positions of nucleotide residues | | |
| | shown in SEQ ID NO: 595, and where b is greater than | | |
| | or equal to a + 14. | | |
| 846040 | Preferably excluded from the present invention are | | |
| | one or more polynucltodies comprising a nucleotide | | |
| | sequence described by the general formula of a − b, | | |
| | where a is any integer between 1 to 1274 of SEQ ID | | |
| | NO: 596, b is an integer of 15 to 1288, where both a | | |
| | and b correspond to the positions of nucleotide | | |
| | residues shown in SEQ ID NO: 596, and where bi s | | |
| | greater than or equal to a + 14. | | |
| 846073 | Preferably excluded from the present invention are | T83567, T83771, R51147, N26938, N32715, N36666, W57781, W74108, AA082091, | |
| | one or more polynucleotides comprising a nucleotide | AA425613 | |
| | sequence described by the general formula of a − b, | | |
| | where a is any integer between 1 to 1038 of SEQ ID | | |
| | NO: 597, b is an integer of 15 to 1052, where both a | | |
| | and b correspond to the positions of nucleotide | | |
| | residues shown in SEQ ID NO: 597, and where b is | | |
| | greater than or equal to a + 14. | | |
| 846257 | Preferably excluded from the present invention are | | |
| | one or more polynucleotides comprising a nucleotide | | |
| | sequence described by the general formula of a − b, | | |
| | where a is any integer between 1 to 2079 of SEQ ID | | |
| | NO: 598, b is an integer of 15 to 2093, where both a | | |
| | and b correspond to the positions of nucleotide | | |
| | residues shown in SEQ ID NO: 598, and where b is | | |
| | greater than or equal to a + 14. | | |

[0058]

| | | |
|---|---|---|
| | | Z28555, T25877, D30980, D31048, D31377, F00724, AA682530, AA694353 |
| 841264 | preferably excluded from the present invention are | |
| | one or more polynucleotides comprising a nucleotide | |
| | sequence described by the general formula of a-b, | |
| | where a is any integer between 1 to 1162 of SEQ ID | |
| | NO:545, b is an integer of 15 to 1176, where both a | |
| | and b correspond to the positions of nucleotide | |
| | residues shown in SEQ ID NO:545, and where b is | |
| | greater than or equal to a +14. | |
| 841275 | preferably excluded from the present invention are | |
| | one or more polynucleotides comprising a nucleotide | |
| | sequence described by the general formula of a-b, | |
| | where a is any integer between 1 to 1721 of SEQ ID | |
| | NO:546, b is an integer of 15 to 1735, where both a | |
| | and b correspond to the positions of nucleotide | |
| | residues shown in SEQ ID NO:546, and where b is | |
| | greater than or equal to a +14. | |
| 841311 | preferably excluded from the present invention are | |
| | one or more polynucleotides comprising a nucleotide | |
| | sequence described by the general formula of a-b, | |
| | where a is any integer between 1 to 1034 of SEQ ID | |
| | NO:547, b is an integer of 15 to 1048, where both a | |
| | and b correspond to the positions of nucleotide | |
| | residues shown in SEQ ID NO:547, and where b is | |
| | greater than or equal to a +14. | |
| 841313 | preferably excluded from the present invention are | |
| | one or more polynucleotides comprising a nucleotide | |
| | sequence described by the general formula of a-b, | |
| | where a is any integer between 1 to 722 of SEQ ID | |
| | NO:548, b is an integer of 15 to 736, where both a and | |
| | b correspond to the positions of nucleotide residues | |
| | shown in SEQ ID NO:548, and where b is greater than | |
| | or equal to a +14. | |
| 841317 | preferably excluded from the present invention are | T78127, R31279, R31890, R38014, R68187, R68186, R68960, R81444, R81647, |
| | one or more polynucleotides comprising a nucleotide | H03085, H42975, N22228, N35405, N40226, N52138, N66461, N66470, W48764, |
| | sequence described by the general formula of a-b, | W49783, W58388, AA044222, AA044341, AA131687, AA131731, AA224224, |
| | where a is any integer between ito 2217 of SEQ ID | A224527, AA469092, AA580878, AA573581, AA863153, AA903745, AA971415, |
| | NO:549, b is an integer of 15 to 2231, where both a | C03879, AA249392, AA448556, AA449703, F22605, AA723322, AA904943, |
| | and b correspond to the positions of nucleotide | Z18868, AA971554, AA991799, AI015846, AI037913, AI056007, AI082497, |
| | residues shown in SEQ ID NO:549, and where b is | AI090170, AI095394 |
| | greater than or equal to a +14. | |
| 841322 | preferably excluded from the present invention are | R21970, R83459, H65911, W76286, AA182592, AA281797, AA281874, AA291943, |
| | one or more polynucleotides comprising a nucleotide | H65824, AA580660, AA748474, AA829390, AA293389, AA401755, AA910004, |
| | sequence described by the general formula of a-b, | A994494, AI005165, AI081877 |
| | where a is any integer between 1 to 1802 of SEQ ID | |
| | NO:550, b is an integer of 15 to 1816, where both a | |
| | and b correspond to the positions of nucleotide | |
| | residues shown in SEQ ID NO:550, and where b is | |
| | greater than or equal to a +14. | |
| 841331 | preferably excluded from the present invention are | |
| | one or more polynucleotides comprising a nucleotide | |
| | sequence described by the general formula of a-b, | |
| | where a is any integer between 1 to 2596 of SEQ ID | |
| | NO:55 1, b is an integer of 15 to 2610, where both a | |
| | and b correspond to the positions of nucleotide | |
| | residues shown in SEQ ID NO:55 1, and where b is | |
| | greater than or equal to a +14. | |
| 841332 | preferably excluded from the present invention are | |
| | one or more polynucleotides comprising a nucleotide | |
| | sequence described by the general formula of a-b, | |
| | where a is any integer between 1 to 4007 of SEQ ID | |
| | NO:552, b is an integer of 15 to 4021, where both a | |
| | and b correspond to the positions of nucleotide | |
| | residues shown in SEQ ID NO:552, and where b is | |
| | greater than or equal to a +14. | |
| 841338 | preferably excluded from the present invention are | |
| | one or more polynucleotides comprising a nucleotide | |
| | sequence described by the general formula of a-b, | |
| | where a is any integer between 1 to 1766 of SEQ ID | |
| | NO:553, b is an integer of 15 to 1780, where both a | |
| | and b correspond to the positions of nucleotide | |
| | residues shown in SEQ ID NO:553, and where b is | |
| | greater than or equal to a +14. | |
| 841345 | preferably excluded from the present invention are | |
| | one or more polynucleotides comprising a nucleotide | |
| | sequence described by the general formula of a-b, | |
| | where a is any integer between 1 to 3699 of SEQ ID | |
| | NO:554, b is an integer of 15 to 3713, where both a | |
| | and b correspond to the positions of nucleotide | |
| | residues shown in SEQ ID NO:554, and where b is | |
| | greater than or equal to a +14. | |
| 841349 | preferably excluded from the present invention are | |
| | one or more polynucleotides comprising a nucleotide | |
| | sequence described by the general formula of a-b, | |
| | where a is any integer between 1 to 1983 of SEQ ID | |
| | NO:555, b is an integer of 15 to 1997, where both a | |
| | and b correspond to the positions of nucleotide | |
| | residues shown in SEQ ID NO:555, and where b is | |
| | greater than or equal to a +14. | |
| 841355 | preferably excluded from the present invention are | |
| | one or more polynucleotides comprising a nucleotide | |
| | sequence described by the general formula of a-b, | |
| | where a is any integer between 1 to 892 of SEQ ID | |
| | NO:556, b is an integer of 15 to 906, where both a and | |
| | b correspond to the positions of nucleotide residues | |
| | shown in SEQ ID NO:556, and where b is greater than | |
| | or equal to a +14. | |
| 841417 | preferably excluded from the present invention are | |
| | one or more polynucleotides comprising a nucleotide | |
| | sequence described by the general formula of a-b, | |
| | where a is any integer between 1 to 3470 of SEQ ID | |
| | NO:557, b is an integer of 15 to 3484, where both a | |
| | and b correspond to the positions of nucleotide | |
| | residues shown in SEQ ID NO:557, and where b is | |
| | greater than or e ual to a +14. | |
| 841548 | preferably excluded from the present invention are | AA223588 |
| | one or more polynucleotides comprising a nucleotide | |
| | sequence described by the general formula of a-b, | |
| | where a is any integer between 1 to 776 of SEQ ID | |
| | NO:558, b is an integer of 15 to 790, where both a and | |
| | b correspond to the positions of nucleotide residues | |
| | shown in SEQ ID NO:558, and where b is greater than | |
| | or equal to a +14. | |
| 841632 | preferably excluded from the present invention are | |
| | one or more polynucleotides comprising a nucleotide | |
| | sequence described by the general formula of a-b, | |
| | where a is any integer between 1 to 544 of SEQ ID | |
| | NO:559, b is an integer of 15 to 558, where both a and | |
| | b correspond to the positions of nucleotide residues | |
| | shown in SEQ ID NO:559, and where b is greater than | |
| | or equal to a +14. | |
| 841662 | preferably excluded from the present invention are | H15850, H99706, N78646, W74702, W94916, AA809695 |
| | one or more polynucleotides comprising a nucleotide | |
| | sequence described by the general formula of a-b, | |
| | where a is any integer between 1 to 520 of SEQ ID | |
| | NO:560, b is an integer of 15 to 534, where both a and | |
| | b correspond to the positions of nucleotide residues | |
| | shown in SEQ ID NO:560, and where b is greater than | |
| | or equal to a +14. | |
| 841771 | preferably excluded from the present invention are | T50029, T67900, T74699, T74819, T88802, T81298, T84439, T95656, R06092, |
| | one or more polynucleotides comprising a nucleotide | R06196, R14563, R14966, R14970, R16465, R38948, R40957, R40957, R63975, |
| | sequence described by the general formula of a-b, | R66362, R66363, R67505, H17644, H17758, R92097, H48240, H48331, H49625, |
| | where a is any integer between ito 3029 of SEQ ID | H49715, H61167, H62068, H69147, N25753, N36472, N69035, N71493, N92970, |
| | NO:561, b is an integer of 15 to 3043, where both a | N98567, N99536, W00665, W24251, W40582, W45462, W45538, W45525, W45687, |
| | and b correspond to the positions of nucleotide | W44315, W57971, W57944, W70012, W70013, W86733, AA044684, AA071192, |
| | residues shown in SEQ ID NO:561, and where b is | AA071199, AA190325, AA191520, AA533197, AA558210, AA581106, AA581161, |
| | greater than or equal to a +14. | AA577119, AA857551, AA878885, AA936839, AA975697, D78980, W28535, |
| | | C02075, C17857 |
| 841827 | preferably excluded from the present invention are | |
| | one or more polynucleotides comprising a nucleotide | |
| | sequence described by the general formula of a-b, | |
| | where a is any integer between ito 1372 of SEQ ID | |
| | NO:562, b is an integer of 15 to 1386, where both a | |
| | and b correspond to the positions of nucleotide | |
| | residues shown in SEQ ID NO:562, and where b is | |
| | greater than or equal to a +14. | |
| 841835 | preferably excluded from the present invention are | |
| | one or more polynucleotides comprising a nucleotide | |
| | sequence described by the general formula of a-b, | |
| | where a is any integer between 1 to 2624 of SEQ ID | |
| | NO:563, b is an integer of 15 to 2638, where both a | |
| | and b correspond to the positions of nucleotide | |
| | residues shown in SEQ ID NO:563, and where b is | |
| | greater than or equal to a +14. | |
| 842259 | preferably excluded from the present invention are | |
| | one or more polynucleotides comprising a nucleotide | |
| | sequence described by the general formula of a-b, | |
| | where a is any integer between 1 to 677 of SEQ ID | |
| | NO:564, b is an integer of 15 to 691, where both a and | |
| | b correspond to the positions of nucleotide residues | |
| | shown in SEQ ID NO:564, and where b is greater than | |
| | or equal to a +14. | |
| 842463 | preferably excluded from the present invention are | |
| | one or more polynucleotides comprising a nucleotide | |
| | sequence described by the general formula of a-b, | |
| | where a is any integer between 1 to 1953 of SEQ ID | |
| | NO:565, b is an integer of 15 to 1967, where both a | |
| | and b correspond to the positions of nucleotide | |
| | residues shown in SEQ ID NO:565, and where b is | |
| | greater than or equal to a +14. | |
| 842595 | preferably excluded from the present invention are | |
| | one or more polynucleotides comprising a nucleotide | |
| | sequence described by the general formula of a-b, | |
| | where a is any integer between ito 1320 of SEQ ID | |
| | NO:566, b is an integer of 15 to 1334, where both a | |
| | and b correspond to the positions of nucleotide | |
| | residues shown in SEQ ID N0:566, and where b is | |
| | greater than or equal to a +14. | |
| 842722 | preferably excluded from the present invention are | |
| | one or more polynucleotides comprising a nucleotide | |
| | sequence described by the general formula of a-b, | |
| | where a is any integer between 1 to 1596 of SEQ ID | |
| | NO:567, b is an integer of 15 to 1610, where both a | |
| | and b correspond to the positions of nucleotide | |
| | residues shown in SEQ ID N0:567, and where b is | |
| | greater than or equal to a +14. | |
| 842815 | preferably excluded from the present invention are | |
| | one or more polynucleotides comprising a nucleotide | |
| | sequence described by the general formula of a-b, | |
| | where a is any integer between ito 1398 of SEQ ID | |
| | NO:568, b is an integer of 15 to 1412, where both a | |
| | and b correspond to the positions of nucleotide | |
| | residues shown in SEQ ID N0:568, and where b is | |
| | greater than or equal to a +14. | |
| 842818 | preferably excluded from the present invention are | |
| | one or more polynucleotides comprising a nucleotide | |
| | sequence described by the general formula of a-b, | |
| | where a is any integer between 1 to 1111 of SEQ ID | |
| | NO:569, b is an integer of 15 to 1125, where both a | |
| | and b correspond to the positions of nucleotide | |
| | residues shown in SEQ ID NO:569, and where b is | |
| | greater than or equal to a +14. | |
| 843251 | preferably excluded from the present invention are | |
| | one or more polynucleotides comprising a nucleotide | |
| | sequence described by the general formula of a-b, | |
| | where a is any integer between 1 to 1902 of SEQ ID | |
| | NO:570, b is an integer of 15 to 1916, where both a | |
| | and b correspond to the positions of nucleotide | |
| | residues shown in SEQ ID NO:570, and where b is | |
| | greater than or equal to a +14. | |
| 843422 | preferably excluded from the present invention are | |
| | one or more polynucleotides comprising a nucleotide | |
| | sequence described by the general formula of a-b, | |
| | where a is any integer between 1 to 1239 of SEQ ID | |
| | NO:57 1, b is an integer of 15 to 1253, where both a | |
| | and b correspond to the positions of nucleotide | |
| | residues shown in SEQ ID NO:571, and where b is | |
| | greater than or equal to a +14. | |
| 843784 | preferably excluded from the present invention are | |
| | one or more polynucleotides comprising a nucleotide | |
| | sequence described by the general formula of a-b, | |
| | where a is any integer between 1 to 1999 of SEQ ID | |
| | NO:572, b is an integer of 15 to 2013, where both a | |
| | and b correspond to the positions of nucleotide | |
| | residues shown in SEQ ID NO:572, and where b is | |
| | greater than or equal to a +14. | |
| 844017 | preferably excluded from the present invention are | AA075932 |
| | one or more polynucleotides comprising a nucleotide | |
| | sequence described by the general formula of a-b, | |
| | where a is any integer between 1 to 655 of SEQ ID | |
| | NO:573, b is an integer of 15 to 669, where both a and | |
| | b correspond to the positions of nucleotide residues | |
| | shown in SEQ ID NO:573, and where b is greater than | |
| | or equal to a +14. | |
| 844138 | preferably excluded from the present invention are | T54096, T54187, T54360, T39143, T40432, T90493, T90589, T89428, T89794, |
| | one or more polynucleotides comprising a nucleotide | T80000, R00221, R00327, R25952, R26450, R26761, R28459, R55293, R55390, |
| | sequence described by the general formula of a-b, | R73233, H42630, H44454, 1144498, R83525, R86282, 1185785, N33586, N34419, |
| | where a is any integer between ito 2418 of SEQ ID | N36244, N48653, N49430, W51915, AA055530, AA055939, AA069732, AA100817, |
| | NO:574, b is an integer of 15 to 2432, where both a | AA122084, AA121407, AA126332, AA133329, AA134151, AA134152, AA134714, |
| | and b correspond to the positions of nucleotide | AA136470, AA136960, AA157850, AA157906, AA157976, AA159365, AA171854, |
| | residues shown in SEQ ID NO:574, and where b is | AA187219, AA186342, AA250818, AA464565, AA464666, AA428826, AA429361, |
| | greater than or equal to a +14. | AA491863, AA505512, AA524490, AA558038, AA581979, AA588712, AA593885, |
| | | AA601110, AA573930, AA577156, AA578735, AA689519, AA730155, AA768486, |
| | | AA805061, AA826981, AA865985, AA931167, AA947324, AA953202, AA961105, |
| | | AA962413, AA976440, AA977760, AI032134, AI053416, AI053575, AI054013, |
| | | AI054146, AI054281, U46376, W22126, C00371, C05283, AA641416, AA643346, |
| | | AA292261, AA421818, AA496452, AA496521, AA653437, AA664399, AA680123, |
| | | AA431832, AA434143, AA678582, AA705952, AA679763, AA733019, AA781645, |
| | | AA813232, AA833597, AA844624, AI024151, AI038232, AI042551, AI080152, |
| | | AI086490, T24101, F03522, F07244 |
| 844166 | preferably excluded from the present invention are | |
| | one or more polynucleotides comprising a nucleotide | |
| | sequence described by the general formula of a-b, | |
| | where a is any integer between 1 to 1358 of SEQ ID | |
| | NO:575, b is an integer of 15 to 1372, where both a | |
| | and b correspond to the positions of nucleotide | |
| | residues shown in SEQ ID NO:575, and where b is | |
| | greater than or equal to a +14. | |
| 844194 | preferably excluded from the present invention are | |
| | one or more polynucleotides comprising a nucleotide | |
| | sequence described by the general formula of a-b, | |
| | where a is any integer between 1 to 2006 of SEQ ID | |
| | NO:576, b is an integer of 15 to 2020, where both a | |
| | and b correspond to the positions of nucleotide | |
| | residues shown in SEQ ID NO:576, and where b is | |
| | greater than or equal to a +14. | |
| 844394 | preferably excluded from the present invention are | |
| | one or more polynucleotides comprising a nucleotide | |
| | sequence described by the general formula of a-b, | |
| | where a is any integer between 1 to 3147 of SEQ ID | |
| | NO:577, b is an integer of 15 to 3161, where both a | |
| | and b correspond to the positions of nucleotide | |
| | residues shown in SEQ ID NO:577, and where b is | |
| | greater than or equal to a +14. | |
| 844450 | preferably excluded from the present invention are | |
| | one or more polynucleotides comprising a nucleotide | |
| | sequence described by the general formula of a-b, | |
| | where a is any integer between 1 to 2032 of SEQ ID | |
| | NO:578, b is an integer of 15 to 2046, where both a | |
| | and b correspond to the positions of nucleotide | |
| | residues shown in SEQ ID NO:578, and where b is | |
| | greater than or equal to a +14. | |
| 844534 | preferably excluded from the present invention are | |
| | one or more polynucleotides comprising a nucleotide | |
| | sequence described by the general formula of a-b, | |
| | where a is any integer between 1 to 288 of SEQ ID | |
| | NO:579, b is an integer of 15 to 302, where both a and | |
| | b correspond to the positions of nucleotide residues | |
| | shown in SEQ ID NO:579, and where b is greater than | |
| | or equal to a +14. | |
| 844535 | preferably excluded from the present invention are | |
| | one or more polynucleotides comprising a nucleotide | |
| | sequence described by the general formula of a-b, | |
| | where a is any integer between 1 to 3053 of SEQ ID | |
| | NO:580, b is an integer of 15 to 3067, where both a | |
| | and b correspond to the positions of nucleotide | |
| | residues shown in SEQ ID NO:580, and where b is | |
| | greater than or equal to a +14. | |
| 844644 | preferably excluded from the present invention are | |
| | one or more polynucleotides comprising a nucleotide | |
| | sequence described by the general formula of a-b, | |
| | where a is any integer between 1 to 1560 of SEQ ID | |
| | NO:58 1, b is an integer of 15 to 1574, where both a | |
| | and b correspond to the positions of nucleotide | |
| | residues shown in SEQ ID NO:581, and where b is | |
| | greater than or equal to a +14. | |
| 844653 | preferably excluded from the present invention are | |
| | one or more polynucleotides comprising a nucleotide | |
| | sequence described by the general formula of a-b, | |
| | where a is any integer between 1 to 946 of SEQ ID | |
| | NO:582, b is an integer of 15 to 960, where both a and | |
| | correspond to the positions of nucleotide residues | |
| | shown in SEQ ID NO:5 82, and where b is greater | |
| | than or equal to a +14. | |
| 844659 | preferably excluded from the present invention are | |
| | one or more polynucleotides comprising a nucleotide | |
| | sequence described by the general formula of a-b, | |
| | where a is any integer between 1 to 527 of SEQ ID | |
| | NO:583, b is an integer of 15 to 541, where both a and | |
| | correspond to the positions of nucleotide residues | |
| | shown in SEQ ID NO:583, and where b is greater than | |
| | or equal to a +14. | |
| 844796 | preferably excluded from the present invention are | |
| | one or more polynucleotides comprising a nucleotide | |
| | sequence described by the general formula of a-b, | |
| | where a is any integer between 1 to 2954 of SEQ ID | |
| | NO:584, b is an integer of 15 to 2968, where both a | |
| | and b correspond to the positions of nucleotide | |
| | residues shown in SEQ ID NO:584, and where b is | |
| | greater than or equal to a +14. | |
| 844812 | preferably excluded from the present invention are | |
| | one or more polynucleotides comprising a nucleotide | |
| | sequence described by the general formula of a-b, | |
| | where a is any integer between 1 to 2594 of SEQ ID | |
| | NO:585, b is an integer of 15 to 2608, where both a | |
| | and b correspond to the positions of nucleotide | |
| | residues shown in SEQ ID N0:585, and where b is | |
| | greater than or equal to a +14. | |
| 844894 | preferably excluded from the present invention are | |
| | one or more polynucleotides comprising a nucleotide | |
| | sequence described by the general formula of a-b, | |
| | where a is any integer between 1 to 1879 of SEQ ID | |
| | NO:586, b is an integer of 15 to 1893, where both a | |
| | and b correspond to the positions of nucleotide | |
| | residues shown in SEQ ID N0:586, and where b is | |
| | greater than or equal to a +14. | |
| 845361 | preferably excluded from the present invention are | T93072, T93161, T69748, T70732, R01200, R01312, R05457, R05477, R05584, |
| | one or more polynucleotides comprising a nucleotide | R43190, R43190, R65942, R75719, R78234, H03875, H03876, H15845, H16155, |
| | sequence described by the general formula of a-b, | H17787, H40269, H45881, R84787, R92493, R92931, H58301, H58912, H58913, |
| | where a is any integer between 1 to 2449 of SEQ ID | H62257, H67051, H68135, H81385, H83681, H91363, H96711, N20348, N22509, |
| | NO:587, b is an integer of 15 to 2463, where both a | N27952, N28616, N31997, N32005, N36007, N39356, N40718, N70011, N70094, |
| | and b correspond to the positions of nucleotide | N92576, N99870, W00896, W00925, W04623, W25220, W31522, W37278, W37791, |
| | residues shown in SEQ ID NO:587, and where b is | W38868, W52654, W51751, AA017158, AA019458, AA022914, AA022915, |
| | greater than or equal to a +14. | AA037370,AA037502, AA045696, AA045697, AA046013, AA054565, AA054625, |
| | | AA069778, AA079736, AA081087, AA081144, AA100055, AA100504, AA100334, |
| | | AA069778, AA115554, AA126149, AA126373, AA133101, AA130558, AA136439, |
| | | AA069778, AA151821, AA151822, AA159031, AA165200, AA165201, AA176477, |
| | | AA176498, AA176771, AA176830, AA182601, AA176736, AA187943, AA188578, |
| | | AA188675, AA190342, AA190343, AA195091, AA213662, AA213715, AA232222, |
| | | AA426516, AA424760, AA483564, AA490859, AA491042, AA505249, AA507988, |
| | | AA508858, AA513433, AA514771, AA514785, AA514980, AA527545, AA534100, |
| | | AA554008, AA557148, AA584946, AA586481, AA587849, AA588781, AA593916, |
| | | AA605049, AA604893, AA617650, AA568567, AA621979, AA627588, AA578585, |
| | | AA578744, AA661910, AA729355, AA729902, AA736994, AA738388, AA740375, |
| | | AA578744, AA760943, AA830401, AA834201, AA834208, AA834250, AA864864, |
| | | AA888527, AA906940, AA922073, AA927272, AA931625, AA933055, AA932772, |
| | | AA936861, AA938504, AA975187, AA977857, AA975594, A1000724, A1014600, |
| | | A1017381, AI066441, D82733, U47688, N83708, N83790, N85010, W22533, |
| | | W23255, N86314, N87393, N88971, AA642249, AA642903, AA090403, AA091011, |
| | | AA095990, AA205824, AA204931, AA643262, AA648446, AA216706, AA219615, |
| | | AA249170, C75338, AA599187, AA668746, AA670340, AA405611, AA405150, |
| | | AA708635, AA716044, AA722076, AA722829, AA725716, AA781064, AA844379, |
| | | AI037987, AI039577, A1078722, A1077655, A1080306, A1084320, A1085219, |
| | | AI093296, AI093479, AI095168, AI095267, D29018, F02782, F06502, F00762, |
| | | F00966 |
| 845620 | preferably excluded from the present invention are | |
| | one or more polynucleotides comprising a nucleotide | |
| | sequence described by the general formula of a-b, | |
| | where a is any integer between 1 to 1931 of SEQ ID | |
| | NO:588, b is an integer of 15 to 1945, where both a | |
| | and b correspond to the positions of nucleotide | |
| | residues shown in SEQ ID NO:588, and where b is | |
| | greater than or equal to a +14. | |
| 845639 | preferably excluded from the present invention are | |
| | one or more polynucleotides comprising a nucleotide | |
| | sequence described by the general formula of a-b, | |
| | where a is any integer between 1 to 802 of SEQ ID | |
| | NO:589, b is an integer of 15 to 816, where both a and | |
| | b correspond to the positions of nucleotide residues | |
| | shown in SEQ ID NO:589, and where b is greater than | |
| | or equal to a +14. | |
| 845660 | preferably excluded from the present invention are | |
| | one or more polynucleotides comprising a nucleotide | |
| | sequence described by the general formula of a-b, | |
| | where a is any integer between 1 to 2293 of SEQ ID | |
| | NO:590, b is an integer of 15 to 2307, where both a | |
| | and b correspond to the positions of nucleotide | |
| | residues shown in SEQ ID NO:590, and where b is | |
| | greater than or equal to a +14. | |
| 845720 | preferably excluded from the present invention are | |
| | one or more polynucleotides comprising a nucleotide | |
| | sequence described by the general formula of a-b, | |
| | where a is any integer between 1 to 1424 of SEQ ID | |
| | NO:591, b is an integer of 15 to 1438, where both a | |
| | and b correspond to the positions of nucleotide | |
| | residues shown in SEQ ID NO:59 1, and where b is | |
| | greater than or equal to a +14. | |
| 845785 | preferably excluded from the present invention are | |
| | one or more polynucleotides comprising a nucleotide | |
| | sequence described by the general formula of a-b, | |
| | where a is any integer between 1 to 1064 of SEQ ID | |
| | NO:592, b is an integer of 15 to 1078, where both a | |
| | and b correspond to the positions of nucleotide | |
| | residues shown in SEQ ID NO:592, and where b is | |
| | greater than or equal to a +14. | |
| 845897 | preferably excluded from the present invention are | |
| | one or more polynucleotides comprising a nucleotide | |
| | sequence described by the general formula of a-b, | |
| | where a is any integer between 1 to 2478 of SEQ ID | |
| | NO:593, b is an integer of 15 to 2492, where both a | |
| | and b correspond to the positions of nucleotide | |
| | residues shown in SEQ ID NO:593, and where b is | |
| | greater than or equal to a +14. | |
| 845922 | preferably excluded from the present invention are | |
| | one or more polynucleotides comprising a nucleotide | |
| | sequence described by the general formula of a-b, | |
| | where a is any integer between 1 to 1890 of SEQ ID | |
| | NO:594, b is an integer of 15 to 1904, where both a | |
| | and b correspond to the positions of nucleotide | |
| | residues shown in SEQ ID NO:594, and where b is | |
| | greater than or equal to a +14. | |
| 846016 | preferably excluded from the present invention are | |
| | one or more polynucleotides comprising a nucleotide | |
| | sequence described by the general formula of a-b, | |
| | where a is any integer between 1 to 323 of SEQ ID | |
| | NO:595, b is an integer of 15 to 337, where both a and | |
| | b correspond to the positions of nucleotide residues | |
| | shown in SEQ ID NO:595, and where b is greater than | |
| | or equal to a +14. | |
| 846040 | preferably excluded from the present invention are | |
| | one or more polynucleotides comprising a nucleotide | |
| | sequence described by the general formula of a-b, | |
| | where a is any integer between 1 to 1274 of SEQ ID | |
| | NO:596, b is an integer of 15 to 1288, where both a | |
| | and b correspond to the positions of nucleotide | |
| | residues shown in SEQ ID NO:596, and where b is | |
| | greater than or equal to a +14. | |
| 846073 | preferably excluded from the present invention are | T83567, T83771, R51147, N26938, N32715, N36666, W57781, W74108, |
| | one or more polynucleotides comprising a nucleotide | AA082091, AA425613 |
| | sequence described by the general formula of a-b, | |
| | where a is any integer between 1 to 1038 of SEQ ID | |
| | NO:597, b is an integer of 15 to 1052, where both a | |
| | and b correspond to the positions of nucleotide | |
| | residues shown in SEQ ID NO:597, and where b is | |
| | greater than or equal to a +14. | |
| 846257 | preferably excluded from the present invention are | |
| | one or more polynucleotides comprising a nucleotide | |
| | sequence described by the general formula of a-b, | |
| | where a is any integer between 1 to 2079 of SEQ ID | |
| | NO:598, b is an integer of 15 to 2093, where both a | |
| | and b correspond to the positions of nucleotide | |
| | residues shown in SEQ ID NO:598, and where b is | |
| | greater than or e ual to a +14. | |

[0059] Polynucleotide and Polypeptide Variants

[0060] The present invention is directed to variants of the polynucleotide sequence disclosed in SEQ ID NO:X or the complementary strand thereto, and/or the cDNA sequence contained in a cDNA clone contained in the deposit.

[0061] The present invention also encompasses variants of the cancer polypeptide sequence disclosed in SEQ ID NO:Y, a polypeptide sequence encoded by the polynucleotide sequence in SEQ ID NO:X, and/or a polypeptide sequence encoded by the cDNA in the related cDNA clone contained in the deposit.

[0062] “Variant” refers to a polynucleotide or polypeptide differing from the polynucleotide or polypeptide of the present invention, but retaining essential properties thereof. Generally, variants are overall closely similar, and, in many regions, identical to the polynucleotide or polypeptide of the present invention.

[0063] The present invention is also directed to nucleic acid molecules which comprise, or alternatively consist of, a nucleotide sequence which is at least 80%, 85%, 90%, 95%, 96%, 97%, 98%, 99% or 100%, identical to, for example, the nucleotide coding sequence in SEQ ID NO:X or the complementary strand thereto, the nucleotide coding sequence of the related cDNA contained in a deposited library or the complementary strand thereto, a nucleotide sequence encoding the polypeptide of SEQ ID NO:Y, a nucleotide sequence encoding a polypeptide sequence encoded by the nucleotide sequence in SEQ ID NO:X, a nucleotide sequence encoding the polypeptide encoded by the cDNA in the related cDNA contained in a deposited library, and/or polynucleotide fragments of any of these nucleic acid molecules (e.g., those fragments described herein). Polypeptides encoded by these nucleic acid molecules are also encompassed by the invention. In another embodiment, the invention encompasses nucleic acid molecules which comprise or alternatively consist of, a polynucleotide which hybridizes under stringent hybridization conditions, or alternatively, under low stringency conditions, to the nucleotide coding sequence in SEQ ID NO:X, the nucleotide coding sequence of the related cDNA clone contained in a deposited library, a nucleotide sequence encoding the polypeptide of SEQ ID NO:Y, a nucleotide sequence encoding a polypeptide sequence encoded by the nucleotide sequence in SEQ ID NO:X, a nucleotide sequence encoding the polypeptide encoded by the cDNA in the related cDNA clone contained in a deposited library, and/or polynucleotide fragments of any of these nucleic acid molecules (e.g., those fragments described herein). Polynucleotides which hybridize to the complement of these nucleic acid molecules under stringent hybridization conditions or alternatively, under lower stringency conditions, are also encompassed by the invention, as are polypeptides encoded by these polynucleotides.

[0064] The present invention is also directed to polypeptides which comprise, or alternatively consist of, an amino acid sequence which is at least 80%, 85%, 90%, 95%, 96%, 97%, 98%, 99% or 100% identical to, for example, the polypeptide sequence shown in SEQ ID NO:Y, a polypeptide sequence encoded by the nucleotide sequence in SEQ ID NO:X, a polypeptide sequence encoded by the cDNA in the related cDNA clone contained in a deposited library, and/or polypeptide fragments of any of these polypeptides (e.g., those fragments described herein). Polynucleotides which hybridize to the complement of the nucleic acid molecules encoding these polypeptides under stringent hybridization conditions, or alternatively, under lower stringency conditions, are also encompassed by the invention, as are polypeptides encoded by these polynucleotides.

[0065] By a nucleic acid having a nucleotide sequence at least, for example, 95% “identical” to a reference nucleotide sequence of the present invention, it is intended that the nucleotide sequence of the nucleic acid is identical to the reference sequence except that the nucleotide sequence may include up to five point mutations per each 100 nucleotides of the reference nucleotide sequence encoding the polypeptide. In other words, to obtain a nucleic acid having a nucleotide sequence at least 95% identical to a reference nucleotide sequence, up to 5% of the nucleotides in the reference sequence may be deleted or substituted with another nucleotide, or a number of nucleotides up to 5% of the total nucleotides in the reference sequence may be inserted into the reference sequence. The query sequence may be, for example, an entire sequence referred to in Table 1, an ORF (open reading frame), or any fragment specified as described herein.

[0066] As a practical matter, whether any particular nucleic acid molecule or polypeptide is at least 80%, 85%, 90%, 95%, 96%, 97%, 98% or 99% identical to a nucleotide sequence of the present invention can be determined conventionally using known computer programs. A preferred method for determining the best overall match between a query sequence (a sequence of the present invention) and a subject sequence, also referred to as a global sequence alignment, can be determined using the FASTDB computer program based on the algorithm of Brutlag et al. (Comp. App. Biosci. 6:237-245 (1990)). In a sequence alignment the query and subject sequences are both DNA sequences. An RNA sequence can be compared by converting U's to T's. The result of said global sequence alignment is in percent identity. Preferred parameters used in a FASTDB alignment of DNA sequences to calculate percent identiy are: Matrix=Unitary, k-tuple=4, Mismatch Penalty=1, Joining Penalty=30, Randomization Group Length=0, Cutoff Score=1, Gap Penalty=5, Gap Size Penalty 0.05, Window Size=500 or the lenght of the subject nucleotide sequence, whichever is shorter.

[0067] If the subject sequence is shorter than the query sequence because of 5′ or 3′ deletions, not because of internal deletions, a manual correction must be made to the results. This is because the FASTDB program does not account for 5′ and 3′ truncations of the subject sequence when calculating percent identity. For subject sequences truncated at the 5′ or 3′ ends, relative to the query sequence, the percent identity is corrected by calculating the number of bases of the query sequence that are 5′ and 3′ of the subject sequence, which are not matched/aligned, as a percent of the total bases of the query sequence. Whether a nucleotide is matched/aligned is determined by results of the FASTDB sequence alignment. This percentage is then subtracted from the percent identity, calculated by the above FASTDB program using the specified parameters, to arrive at a final percent identity score. This corrected score is what is used for the purposes of the present invention. Only bases outside the 5′ and 3′ bases of the subject sequence, as displayed by the FASTDB alignment, which are not matched/aligned with the query sequence, are calculated for the purposes of manually adjusting the percent identity score.

[0068] For example, a 90 base subject sequence is aligned to a 100 base query sequence to determine percent identity. The deletions occur at the 5′ end of the subject sequence and therefore, the FASTDB alignment does not show a matched/alignment of the first 10 bases at 5′ end. The 10 unpaired bases represent 10% of the sequence (number of bases at the 5′ and 3′ ends not matched/total number of bases in the query sequence) so 10% is subtracted from the percent identity score calculated by the FASTDB program. If the remaining 90 bases were perfectly matched the final percent identity would be 90%. In another example, a 90 base subject sequence is compared with a 100 base query sequence. This time the deletions are internal deletions so that there are no bases on the 5′ or 3′ of the subject sequence which are not matched/aligned with the query. In this case the percent identity calculated by FASTDB is not manually corrected. Once again, only bases 5′ and 3′ of the subject sequence which are not matched/aligned with the query sequence are manually corrected for. No other manual corrections are to made for the purposes of the present invention.

[0069] By a polypeptide having an amino acid sequence at least, for example, 95% “identical” to a query amino acid sequence of the present invention, it is intended that the amino acid sequence of the subject polypeptide is identical to the query sequence except that the subject polypeptide sequence may include up to five amino acid alterations per each 100 amino acids of the query amino acid sequence. In other words, to obtain a polypeptide having an amino acid sequence at least 95% identical to a query amino acid sequence, up to 5% of the amino acid residues in the subject sequence may be inserted, deleted, (indels) or substituted with another amino acid. These alterations of the reference sequence may occur at the amino or carboxy terminal positions of the reference amino acid sequence or anywhere between those terminal positions, interspersed either individually among residues in the reference sequence or in one or more contiguous groups within the reference sequence.

[0070] As a practical matter, whether any particular polypeptide is at least 80%, 85%, 90%, 95%, 96%, 97%, 98% or 99% identical to, for instance, the amino acid sequence in SEQ ID NO:Y or a fragment thereof, the amino acid sequence encoded by the nucleotide sequence in SEQ ID NO:X or a fragment thereof, or the amino acid sequence encoded by the cDNA in the related cDNA clone contained in a deposited library, or a fragment thereof, can be determined conventionally using known computer programs. A preferred method for determing the best overall match between a query sequence (a sequence of the present invention) and a subject sequence, also referred to as a global sequence alignment, can be determined using the FASTDB computer program based on the algorithm of Brutlag et al. (Comp. App. Biosci.6:237-245(1990)). In a sequence alignment the query and subject sequences are either both nucleotide sequences or both amino acid sequences. The result of said global sequence alignment is in percent identity. Preferred parameters used in a FASTDB amino acid alignment are: Matrix=PAM 0, k-tuple=2, Mismatch Penalty=1, Joining Penalty=20, Randomization Group Length=0, Cutoff Score=1, Window Size=sequence length, Gap Penalty=5, Gap Size Penalty=0.05, Window Size=500 or the length of the subject amino acid sequence, whichever is shorter.

[0071] If the subject sequence is shorter than the query sequence due to N- or C-terminal deletions, not because of internal deletions, a manual correction must be made to the results. This is because the FASTDB program does not account for N- and C-terminal truncations of the subject sequence when calculating global percent identity. For subject sequences truncated at the N- and C-termini, relative to the query sequence, the percent identity is corrected by calculating the number of residues of the query sequence that are N- and C-terminal of the subject sequence, which are not matched/aligned with a corresponding subject residue, as a percent of the total bases of the query sequence. Whether a residue is matched/aligned is determined by results of the FASTDB sequence alignment. This percentage is then subtracted from the percent identity, calculated by the above FASTDB program using the specified parameters, to arrive at a final percent identity score. This final percent identity score is what is used for the purposes of the present invention. Only residues to the N- and C-termini of the subject sequence, which are not matched/aligned with the query sequence, are considered for the purposes of manually adjusting the percent identity score. That is, only query residue positions outside the farthest N- and C- terminal residues of the subject sequence.

[0072] For example, a 90 amino acid residue subject sequence is aligned with a 100 residue query sequence to determine percent identity. The deletion occurs at the N-terminus of the subject sequence and therefore, the FASTDB alignment does not show a matching/alignment of the first 10 residues at the N-terminus. The 10 unpaired residues represent 10% of the sequence (number of residues at the N- and C- termini not matched/total number of residues in the query sequence) so 10% is subtracted from the percent identity score calculated by the FASTDB program. If the remaining 90 residues were perfectly matched the final percent identity would be 90%. In another example, a 90 residue subject sequence is compared with a 100 residue query sequence. This time the deletions are internal deletions so there are no residues at the N- or C-termini of the subject sequence which are not matched/aligned with the query. In this case the percent identity calculated by FASTDB is not manually corrected. Once again, only residue positions outside the N- and C-terminal ends of the subject sequence, as displayed in the FASTDB alignment, which are not matched/aligned with the query sequence are manually corrected for. No other manual corrections are to made for the purposes of the present invention.

[0073] The variants may contain alterations in the coding regions, non-coding regions, or both. Especially preferred are polynucleotide variants containing alterations which produce silent substitutions, additions, or deletions, but do not alter the properties or activities of the encoded polypeptide. Nucleotide variants produced by silent substitutions due to the degeneracy of the genetic code are preferred. Moreover, variants in which less than 50, less than 40, less than 30, less than 20, less than 10, or 5-50, 5-25, 5-10, 1-5, or 1-2 amino acids are substituted, deleted, or added in any combination are also preferred. Polynucleotide variants can be produced for a variety of reasons, e.g., to optimize codon expression for a particular host (change codons in the human MRNA to those preferred by a bacterial host such as E. coli).

[0074] Naturally occurring variants are called “allelic variants,” and refer to one of several alternate forms of a gene occupying a given locus on a chromosome of an organism. (Genes II, Lewin, B., ed., John Wiley & Sons, New York (1985).) These allelic variants can vary at either the polynucleotide and/or polypeptide level and are included in the present invention. Alternatively, non-naturally occurring variants may be produced by mutagenesis techniques or by direct synthesis.

[0075] Using known methods of protein engineering and recombinant DNA technology, variants may be generated to improve or alter the characteristics of the polypeptides of the present invention. For instance, as discussed herein, one or more amino acids can be deleted from the N-terminus or C-terminus of the polypeptide of the present invention without substantial loss of biological function. The authors of Ron et al., J. Biol. Chem. 268: 2984-2988 (1993), reported variant KGF proteins having heparin binding activity even after deleting 3, 8, or 27 amino-terminal amino acid residues. Similarly, Interferon gamma exhibited up to ten times higher activity after deleting 8-10 amino acid residues from the carboxy terminus of this protein. (Dobeli et al., J. Biotechnology 7:199-216 (1988).)

[0076] Moreover, ample evidence demonstrates that variants often retain a biological activity similar to that of the naturally occurring protein. For example, Gayle and coworkers (J. Biol. Chem 268:22105-22111 (1993)) conducted extensive mutational analysis of human cytokine IL-1a. They used random mutagenesis to generate over 3,500 individual IL-1a mutants that averaged 2.5 amino acid changes per variant over the entire length of the molecule. Multiple mutations were examined at every possible amino acid position. The investigators found that “[m]ost of the molecule could be altered with little effect on either [binding or biological activity].” (See, Abstract.) In fact, only 23 unique amino acid sequences, out of more than 3,500 nucleotide sequences examined, produced a protein that significantly differed in activity from wild-type.

[0077] Furthermore, as discussed herein, even if deleting one or more amino acids from the N-terminus or C-terminus of a polypeptide results in modification or loss of one or more biological functions, other biological activities may still be retained. For example, the ability of a deletion variant to induce and/or to bind antibodies which recognize the secreted form will likely be retained when less than the majority of the residues of the secreted form are removed from the N-terminus or C-terminus. Whether a particular polypeptide lacking N- or C-terminal residues of a protein retains such immunogenic activities can readily be determined by routine methods described herein and otherwise known in the art.

[0078] Thus, the invention further includes polypeptide variants which show a functional activity (e.g., biological activity) of the polypeptide of the invention of which they are a variant. Such variants include deletions, insertions, inversions, repeats, and substitutions selected according to general rules known in the art so as have little effect on activity.

[0079] The present application is directed to nucleic acid molecules at least 80%, 85%, 90%, 95%, 96%, 97%, 98%, 99% or 100% identical to the nucleic acid sequences disclosed herein or fragments thereof, (e.g., including but not limited to fragments encoding a polypeptide having the amino acid sequence of an N and/or C terminal deletion), irrespective of whether they encode a polypeptide having functional activity. This is because even where a particular nucleic acid molecule does not encode a polypeptide having functional activity, one of skill in the art would still know how to use the nucleic acid molecule, for instance, as a hybridization probe or a polymerase chain reaction (PCR) primer. Uses of the nucleic acid molecules of the present invention that do not encode a polypeptide having functional activity include, inter alia, (1) isolating a gene or allelic or splice variants thereof in a cDNA library; (2) in situ hybridization (e.g., “FISH”) to metaphase chromosomal spreads to provide precise chromosomal location of the gene, as described in Verma et al., Human Chromosomes: A Manual of Basic Techniques, Pergamon Press, New York (1988); and (3) Northern Blot analysis for detecting MRNA expression in specific tissues.

[0080] Preferred, however, are nucleic acid molecules having sequences at least 80%, 85%, 90%, 95%, 96%, 97%, 98%, 99% or 100% identical to the nucleic acid sequences disclosed herein, which do, in fact, encode a polypeptide having a functional activity of a polypeptide of the invention.

[0081] Of course, due to the degeneracy of the genetic code, one of ordinary skill in the art will immediately recognize that a large number of the nucleic acid molecules having a sequence at least 80%, 85%, 90%, 95%, 96%, 97%, 98%, 99%, or 100% identical to, for example, the nucleic acid sequence of the cDNA in the related cDNA clone contained in a deposited library, the nucleic acid sequence referred to in Table 1 (SEQ ID NO:X), or fragments thereof, will encode polypeptides “having functional activity.” In fact, since degenerate variants of any of these nucleotide sequences all encode the same polypeptide, in many instances, this will be clear to the skilled artisan even without performing the above described comparison assay. It will be further recognized in the art that, for such nucleic acid molecules that are not degenerate variants, a reasonable number will also encode a polypeptide having functional activity. This is because the skilled artisan is fully aware of amino acid substitutions that are either less likely or not likely to significantly effect protein function (e.g., replacing one aliphatic amino acid with a second aliphatic amino acid), as further described below.

[0082] For example, guidance concerning how to make phenotypically silent amino acid substitutions is provided in Bowie et al., “Deciphering the Message in Protein Sequences: Tolerance to Amino Acid Substitutions,” Science 247:1306-1310 (1990), wherein the authors indicate that there are two main strategies for studying the tolerance of an amino acid sequence to change.

[0083] The first strategy exploits the tolerance of amino acid substitutions by natural selection during the process of evolution. By comparing amino acid sequences in different species, conserved amino acids can be identified. These conserved amino acids are likely important for protein function. In contrast, the amino acid positions where substitutions have been tolerated by natural selection indicates that these positions are not critical for protein function. Thus, positions tolerating amino acid substitution could be modified while still maintaining biological activity of the protein.

[0084] The second strategy uses genetic engineering to introduce amino acid changes at specific positions of a cloned gene to identify regions critical for protein function. For example, site directed mutagenesis or alanine-scanning mutagenesis (introduction of single alanine mutations at every residue in the molecule) can be used. (Cunningham and Wells, Science 244:1081-1085 (1989).) The resulting mutant molecules can then be tested for biological activity.

[0085] As the authors state, these two strategies have revealed that proteins are surprisingly tolerant of amino acid substitutions. The authors further indicate which amino acid changes are likely to be permissive at certain amino acid positions in the protein. For example, most buried (within the tertiary structure of the protein) amino acid residues require nonpolar side chains, whereas few features of surface side chains are generally conserved. Moreover, tolerated conservative amino acid substitutions involve replacement of the aliphatic or hydrophobic amino acids Ala, Val, Leu and Ile; replacement of the hydroxyl residues Ser and Thr; replacement of the acidic residues Asp and Glu; replacement of the amide residues Asn and Gln, replacement of the basic residues Lys, Arg, and His; replacement of the aromatic residues Phe, Tyr, and Trp, and replacement of the small-sized amino acids Ala, Ser, Thr, Met, and Gly. Besides conservative amino acid substitution, variants of the present invention include (i) substitutions with one or more of the non-conserved amino acid residues, where the substituted amino acid residues may or may not be one encoded by the genetic code, or (ii) substitution with one or more of amino acid residues having a substituent group, or (iii) fusion of the mature polypeptide with another compound, such as a compound to increase the stability and/or solubility of the polypeptide (for example, polyethylene glycol), or (iv) fusion of the polypeptide with additional amino acids, such as, for example, an IgG Fc fusion region peptide, or leader or secretory sequence, or a sequence facilitating purification. Such variant polypeptides are deemed to be within the scope of those skilled in the art from the teachings herein.

[0086] For example, polypeptide variants containing amino acid substitutions of charged amino acids with other charged or neutral amino acids may produce proteins with improved characteristics, such as less aggregation. Aggregation of pharmaceutical formulations both reduces activity and increases clearance due to the aggregate's immunogenic activity. (Pinckard et al., Clin. Exp. Immunol. 2:331-340 (1967); Robbins et al., Diabetes 36: 838-845 (1987); Cleland et al., Crit. Rev. Therapeutic Drug Carrier Systems 10:307-377 (1993).)

[0087] A further embodiment of the invention relates to a polypeptide which comprises the amino acid sequence of a polypeptide having an amino acid sequence which contains at least one amino acid substitution, but not more than 50 amino acid substitutions, even more preferably, not more than 40 amino acid substitutions, still more preferably, not more than 30 amino acid substitutions, and still even more preferably, not more than 20 amino acid substitutions. Of course it is highly preferable for a polypeptide to have an amino acid sequence which comprises the amino acid sequence of a polypeptide of SEQ ID NO:Y, an amino acid sequence encoded by SEQ ID NO:X, and/or the amino acid sequence encoded by the cDNA in the related cDNA clone contained in a deposited library which contains, in order of ever-increasing preference, at least one, but not more than 10, 9, 8, 7, 6, 5, 4, 3, 2 or 1 amino acid substitutions. In specific embodiments, the number of additions, substitutions, and/or deletions in the amino acid sequence of SEQ ID NO:Y or fragments thereof (e.g., the mature form and/or other fragments described herein), an amino acid sequence encoded by SEQ ID NO:X or fragments thereof, and/or the amino acid sequence encoded by the cDNA in the related CDNA clone contained in a deposited library or fragments thereof, is 1-5, 5-10, 5-25, 5-50, 10-50 or 50-150, conservative amino acid substitutions are preferable.

[0088] Polynucleotide and Polypeptide Fragments

[0089] The present invention is also directed to polynucleotide fragments of the cancer polynucleotides (nucleic acids) of the invention. In the present invention, a “polynucleotide fragment” refers, for example, to a polynucleotide having a nucleic acid sequence which: is a portion of the cDNA contained in a depostied cDNA clone; or is a portion of a polynucleotide sequence encoding the polypeptide encoded by the cDNA contained in a deposited cDNA clone; or is a portion of the polynucleotide sequence in SEQ ID NO:X or the complementary strand thereto; or is a polynucleotide sequence encoding a portion of the polypeptide of SEQ ID NO:Y; or is a polynucleotide sequence encoding a portion of a polypeptide encoded by SEQ ID NO:X or the complementary strand thereto. The nucleotide fragments of the invention are preferably at least about 15 nt, and more preferably at least about 20 nt, still more preferably at least about 30 nt, and even more preferably, at least about 40 nt, at least about 50 nt, at least about 75 nt, at least about 100 nt, at least about 125 nt or at least about 150 nt in length. A fragment “at least 20 nt in length,” for example, is intended to include 20 or more contiguous bases from, for example, the sequence contained in the cDNA in a related cDNA clone contained in a deposited library, the nucleotide sequence shown in SEQ ID NO:X or the complementary stand thereto. In this context “about” includes the particularly recited value or a value larger or smaller by several (5, 4, 3, 2, or 1) nucleotides. These nucleotide fragments have uses that include, but are not limited to, as diagnostic probes and primers as discussed herein. Of course, larger fragments (e.g., at least 150, 175, 200, 250, 500, 600, 1000, or 2000 nucleotides in length) are also encompassed by the invention.

[0090] Moreover, representative examples of polynucleotide fragments of the invention, include, for example, fragments comprising, or alternatively consisting of, a sequence from about nucleotide number 1-50, 51-100, 101-150, 151-200, 201-250, 251-300, 301-350, 351-400, 401-450, 451-500, 501-550, 551-600, 651-700,701-750, 751-800, 800-850, 851-900, 901-950, 951-1000, 1001-1050, 1051-1100, 1101-1150, 1151-1200, 1201-1250, 1251-1300, 1301-1350, 1351-1400, 1401-1450, 1451-1500, 1501-1550, 1551-1600, 1601-1650, 1651-1700, 1701-1750, 1751-1800, 1801-1850, 1851-1900, 1901-1950, 1951-2000, 2001-2050, 2051-2100, 2101-2150, 2151-2200, 2201-2250, 2251-2300, 2301-2350, 2351-2400, 2401-2450, 2451-2500, 2501-2550, 2551-2600, 2601-2650, 2651-2700, 2701-2750, 2751-2800, 2801-2850, 2851-2900, 2901-2950, 2951-3000, 3001-3050, 3051-3100, 3101-3150, 3151-3200, 3201-3250, 3251-3300, 3301-3350, 3351-3400, 3401-3450, 3451-3500, 3501-3550, and 3551 to the end of SEQ ID NO:X, or the complementary strand thereto. In this context “about” includes the particularly recited range or a range larger or smaller by several (5, 4, 3, 2, or 1) nucleotides, at either terminus or at both termini. Preferably, these fragments encode a polypeptide which has a functional activity (e.g., biological activity) of the polypeptide encoded by the polynucleotide of which the sequence is a portion. More preferably, these fragments can be used as probes or primers as discussed herein. Polynucleotides which hybridize to one or more of these nucleic acid molecules under stringent hybridization conditions or alternatively, under lower stringency conditions, are also encompassed by the invention, as are polypeptides encoded by these polynucleotides or fragments.

[0091] Moreover, representative examples of polynucleotide fragments of the invention, include, for example, fragments comprising, or alternatively consisting of, a sequence from about nucleotide number 1-50, 51-100, 101-150, 151-200, 201-250, 251-300, 301-350, 351-400, 401-450, 451-500, 501-550, 551-600, 651-700,701-750, 751-800, 800-850, 851-900, 901-950, 951-1000, 1001-1050, 1051-1100, 1101-1150, 1151-1200, 1201-1250, 1251-1300, 1301-1350, 1351-1400, 1401-1450, 1451-1500, 1501-1550, 1551-1600, 1601-1650, 1651-1700, 1701-1750, 1751-1800, 1801-1850, 1851-1900, 1901-1950, 1951-2000, 2001-2050, 2051-2100, 2101-2150, 2151-2200, 2201-2250, 2251-2300, 2301-2350, 2351-2400, 2401-2450, 2451-2500, 2501-2550, 2551-2600, 2601-2650, 2651-2700, 2701-2750, 2751-2800, 2801-2850, 2851-2900, 2901-2950, 2951-3000, 3001-3050, 3051-3100, 3101-3150, 3151-3200, 3201-3250, 3251-3300, 3301-3350, 3351-3400, 3401-3450, 3451-3500, 3501-3550, and 3551 to the end of the cDNA nucleotide sequence contained in the deposited cDNA clone, or the complementary strand thereto. In this context “about” includes the particularly recited range, or a range larger or smaller by several (5, 4, 3, 2, or 1) nucleotides, at either terminus or at both termini. Preferably, these fragments encode a polypeptide which has a functional activity (e.g., biological activity) of the polypeptide encoded by the cDNA nucleotide sequence contained in the deposited cDNA clone. More preferably, these fragments can be used as probes or primers as discussed herein. Polynucleotides which hybridize to one or more of these fragments under stringent hybridization conditions or alternatively, under lower stringency conditions, are also encompassed by the invention, as are polypeptides encoded by these polynucleotides or fragments.

[0092] In the present invention, a “polypeptide fragment” refers to an amino acid sequence which is a portion of that contained in SEQ ID NO:Y, a portion of an amino acid sequence encoded by the polynucleotide sequence of SEQ ID NO:X, and/or encoded by the cDNA contained in the related cDNA clone contained in a deposited library. Protein (polypeptide) fragments may be “free-standing,” or comprised within a larger polypeptide of which the fragment forms a part or region, most preferably as a single continuous region. Representative examples of polypeptide fragments of the invention, include, for example, fragments comprising, or alternatively consisting of, an amino acid sequence from about amino acid number 1-20, 21-40, 41-60, 61-80, 81-100, 102-120, 121-140, 141-160, 161-180, 181-200, 201-220, 221-240, 241-260, 261-280, 281-300, 301-320, 321-340, 341-360, 361-380, 381-400, 401-420, 421-440, 441-460, 461-480, 481-500, 501-520, 521-540, 541-560, 561-580, 581-600, 601-620, 621-640, 641-660, 661-680, 681-700, 701-720, 721-740, 741-760, 761-780, 781-800, 801-820, 821-840, 841-860, 861-880, 881-900, 901-920, 921-940, 941-960, 961-980, 981-1000, 1001-1020, 1021-1040, 1041-1060, 1061-1080, 1081-1100, 1101-1120, 1121-1140, 1141-1160, 1161-1180, and 1181 to the end of SEQ ID NO:Y. Moreover, polypeptide fragments of the invention may be at least about 10, 15, 20, 25, 30, 35, 40, 45, 50, 55, 60, 65, 70, 75, 80, 85, 90, 100, 110, 120, 130, 140, or 150 amino acids in length. In this context “about” includes the particularly recited ranges or values, or ranges or values larger or smaller by several (5, 4, 3, 2, or 1) amino acids, at either terminus or at both termini. Polynucleotides encoding these polypeptide fragments are also encompassed by the invention.

[0093] Even if deletion of one or more amino acids from the N-terminus of a protein results in modification of loss of one or more biological functions of the protein, other functional activities (e.g., biological activities, ability to multimerize, ability to bind a ligand) may still be retained. For example, the ability of shortened muteins to induce and/or bind to antibodies which recognize the complete or mature forms of the polypeptides generally will be retained when less than the majority of the residues of the complete or mature polypeptide are removed from the N-terminus. Whether a particular polypeptide lacking N-terminal residues of a complete polypeptide retains such immunologic activities can readily be determined by routine methods described herein and otherwise known in the art. It is not unlikely that a mutein with a large number of deleted N-terminal amino acid residues may retain some biological or immunogenic activities. In fact, peptides composed of as few as six amino acid residues may often evoke an immune response.

[0094] Accordingly, polypeptide fragments of the invention include the secreted protein as well as the mature form. Further preferred polypeptide fragments include the secreted protein or the mature form having a continuous series of deleted residues from the amino or the carboxy terminus, or both. For example, any number of amino acids, ranging from 1-60, can be deleted from the amino terminus of either the secreted polypeptide or the mature form. Similarly, any number of amino acids, ranging from 1-30, can be deleted from the carboxy terminus of the secreted protein or mature form. Furthermore, any combination of the above amino and carboxy terminus deletions are preferred. Similarly, polynucleotides encoding these polypeptide fragments are also preferred.

[0095] The present invention further provides polypeptides having one or more residues deleted from the amino terminus of the amino acid sequence of a polypeptide disclosed herein (e.g., a polypeptide of SEQ ID NO:Y, a polypeptide encoded by the polynucleotide sequence contained in SEQ ID NO:X, and/or a polypeptide encoded by the cDNA contained in the related cDNA clone contained in a deposited library). In particular, N-terminal deletions may be described by the general formula m-q, where q is a whole integer representing the total number of amino acid residues in a polypeptide of the invention (e.g., the polypeptide disclosed in SEQ ID NO:Y), and m is defined as any integer ranging from 2 to q-6. Polynucleotides encoding these polypeptides are also encompassed by the invention.

[0096] Also as mentioned above, even if deletion of one or more amino acids from the C-terminus of a protein results in modification of loss of one or more biological functions of the protein, other functional activities (e.g., biological activities, ability to multimerize, ability to bind a ligand) may still be retained. For example the ability of the shortened mutein to induce and/or bind to antibodies which recognize the complete or mature forms of the polypeptide generally will be retained when less than the majority of the residues of the complete or mature polypeptide are removed from the C-terminus. Whether a particular polypeptide lacking C-terminal residues of a complete polypeptide retains such immunologic activities can readily be determined by routine methods described herein and otherwise known in the art. It is not unlikely that a mutein with a large number of deleted C-terminal amino acid residues may retain some biological or immunogenic activities. In fact, peptides composed of as few as six amino acid residues may often evoke an immune response.

[0097] Accordingly, the present invention further provides polypeptides having one or more residues from the carboxy terminus of the amino acid sequence of a polypeptide disclosed herein (e.g., a polypeptide of SEQ ID NO:Y, a polypeptide encoded by the polynucleotide sequence contained in SEQ ID NO:X, and/or a polypeptide encoded by the cDNA contained in deposited cDNA clone referenced in Table 1). In particular, C-terminal deletions may be described by the general formula 1-n, where n is any whole integer ranging from 6 to q-1, and where n corresponds to the position of an amino acid residue in a polypeptide of the invention. Polynucleotides encoding these polypeptides are also encompassed by the invention.

[0098] In addition, any of the above described N- or C-terminal deletions can be combined to produce a N- and C-terminal deleted polypeptide. The invention also provides polypeptides having one or more amino acids deleted from both the amino and the carboxyl termini, which may be described generally as having residues m-n of a polypeptide encoded by SEQ ID NO:X (e.g., including, but not limited to, the preferred polypeptide disclosed as SEQ ID NO:Y), and/or the cDNA in the related cDNA clone contained in a deposited library, where n and m are integers as described above. Polynucleotides encoding these polypeptides are also encompassed by the invention.

[0099] Any polypeptide sequence contained in the polypeptide of SEQ ID NO:Y, encoded by the polynucleotide sequences set forth as SEQ ID NO:X, or encoded by the cDNA in the related cDNA clone contained in a deposited library may be analyzed to determine certain preferred regions of the polypeptide. For example, the amino acid sequence of a polypeptide encoded by a polynucleotide sequence of SEQ ID NO:X, or the cDNA in a deposited cDNA clone may be analyzed using the default parameters of the DNASTAR computer algorithm (DNASTAR, Inc., 1228 S. Park St., Madison, Wis. 53715 USA; http://www.dnastar.com/).

[0100] Polypeptide regions that may be routinely obtained using the DNASTAR computer algorithm include, but are not limited to, Garnier-Robson alpha-regions, beta-regions, turn-regions, and coil-regions, Chou-Fasman alpha-regions, beta-regions, and turn-regions, Kyte-Doolittle hydrophilic regions and hydrophobic regions, Eisenberg alpha- and beta-amphipathic regions, Karplus-Schulz flexible regions, Emini surface-forming regions and Jameson-Wolf regions of high antigenic index. Among highly preferred polynucleotides of the invention in this regard are those that encode polypeptides comprising regions that combine several structural features, such as several (e.g., 1, 2, 3 or 4) of the features set out above.

[0101] Additionally, Kyte-Doolittle hydrophilic regions and hydrophobic regions, Emini surface-forming regions, and Jameson-Wolf regions of high antigenic index (i.e., containing four or more contiguous amino acids having an antigenic index of greater than or equal to 1.5, as identified using the default parameters of the Jameson-Wolf program) can routinely be used to determine polypeptide regions that exhibit a high degree of potential for antigenicity. Regions of high antigenicity are determined from data by DNASTAR analysis by choosing values which represent regions of the polypeptide which are likely to be exposed on the surface of the polypeptide in an environment in which antigen recognition may occur in the process of initiation of an immune response.

[0102] Preferred polypeptide fragments of the invention are fragments comprising, or alternatively consisting of, an amino acid sequence that displays a functional activity of the polypeptide sequence of which the amino acid sequence is a fragment.

[0103] By a polypeptide demonstrating a “functional activity” is meant, a polypeptide capable of displaying one or more known functional activities associated with a full-length (complete) protein of the invention. Such functional activities include, but are not limited to, biological activity, antigenicity [ability to bind (or compete with a polypeptide for binding) to an anti-polypeptide antibody], immunogenicity (ability to generate antibody which binds to a specific polypeptide of the invention), ability to form multimers with polypeptides of the invention, and ability to bind to a receptor or ligand for a polypeptide.

[0104] Other preferred polypeptide fragments are biologically active fragments. Biologically active fragments are those exhibiting activity similar, but not necessarily identical, to an activity of the polypeptide of the present invention. The biological activity of the fragments may include an improved desired activity, or a decreased undesirable activity.

[0105] In preferred embodiments, polypeptides of the invention comprise, or alternatively consist of, one, two, three, four, five or more of the antigenic fragments of the polypeptide of SEQ ID NO:Y, or portions thereof. Polynucleotides encoding these polypeptides are also encompassed by the invention.

TABLE 4

| Sequence/ | |
|---|---|
| Contig ID | Epitope |
| 507291 | Preferred epitopes include those comprising a sequence |
| | shown in SEQ ID NO. 843 as residues: Pro-12 to Pro-20, |
| | Lys-27 to Gly-34, Pro-67 to Arg-72, Asp-102 to Thr-111, |
| | Asp-136 to Gly-142, Ser-153 to Pro-158. |
| 508000 | Preferred epitopes include those comprising a sequence |
| | shown in SEQ ID NO. 844 as residues: Ala-16 to Trp-35. |
| 518325 | Preferred epitopes include those comprising a sequence |
| | shown in SEQ ID NO. 845 as residues: |
| | Glu-60 to Asp-67. |
| 523111 | Preferred epitopes include those comprising a sequence |
| | shown in SEQ ID NO. 846 as residues: Ser-1 to Gln-10. |
| 532211 | Preferred epitopes include those comprising a sequence |
| | shown in SEQ ID NO. 848 as residues: |
| | Cys-17 to Arg-22. |
| 532247 | Preferred epitopes include those comprising a sequence |
| | shown in SEQ ID NO. 849 as residues: Val-4 to His-10. |
| 537932 | Preferred epitopes include those comprising a sequence |
| | shown in SEQ ID NO. 850 as residues: Ser-62 to Gly-68. |
| 540117 | Preferred epitopes include those comprising a sequence |
| | shown in SEQ ID NO. 851 as residues: Pro-24 to Arg-30, |
| | Met-101 to Phe-106, Thr-138 to Asn-153. |
| 547710 | Preferred epitopes include those comprising a sequence |
| | shown in SEQ ID NO. 852 as residues: Asp-1 to Arg-7, |
| | Glu-25 to His-31, Ile-51 to Lys-56, Pro-61 to Pro-67, |
| | Gly-113 to Thr-119, Lys-125 to Asp-130, His-335 to |
| | Gly-340, Arg-364 to Pro-371. |
| 551747 | Preferred epitopes include those comprising a sequence |
| | shown in SEQ ID NO. 853 as residues: Lys-79 to Ala-88, |
| | Ser-109 to Leu-125, Asp-155 to Lys-163, Tyr-211 to |
| | Thr-219, Pro-221 to Ala-226. |
| 552799 | Preferred epitopes include those comprising a sequence |
| | shown in SEQ ID NO. 854 as residues: Gln-81 to |
| | Thr-114, Gln-200 to Arg-206. |
| 553243 | Preferred epitopes include those comprising a sequence |
| | shown in SEQ ID NO. 855 as residues: Ala-43 to |
| | Asp-48, Asp-64 to Lys-69, His-88 to Thr-94, Ala-107 to |
| | Phe-113, Leu-117 to Ser-125, Thr-132 to Glu-138, |
| | Ser-169 to Trp-181, Ser-194 to Thr-200. |
| 553368 | Preferred epitopes include those comprising a sequence |
| | shown in SEQ ID NO. 856 as residues: Ser-52 to Arg-57, |
| | Leu-76 to Gly-82, Ser-91 to Glu-96, Tyr-132 to Ala-147. |
| 554349 | Preferred epitopes include those comprising a sequence |
| | shown in SEQ ID NO. 857 as residues: Ala-31 to Gly-36, |
| | Ala-68 to Tyr-75, Gln-121 to Asp-127. |
| 558491 | Preferred epitopes include those comprising a sequence |
| | shown in SEQ ID NO. 858 as residues: Pro-1 to Arg-10. |
| 558983 | Preferred epitopes include those comprising a sequence |
| | shown in SEQ ID NO. 859 as residues: Pro-37 to Gly-42, |
| | Val-67 to Lys-84, Gln-122 to Gly-127. |
| 589390 | Preferred epitopes include those comprising a sequence |
| | shown in SEQ ID NO. 862 as residues: Glu-14 to |
| | Asn-19, Arg-68 to Ser-74, Ser-79 to Ala-84, Lys-95 to |
| | Ile-101, Lys-125 to Glu-138. |
| 596882 | Preferred epitopes include those comprising a sequence |
| | shown in SEQ ID NO. 863 as residues: Lys-15 to |
| | Lys-23, Pro-29 to Gly-34. |
| 616289 | Preferred epitopes include those comprising a sequence |
| | shown in SEQ ID NO. 864 as residues: Leu-1 to Pro-13, |
| | Thr-64 to Gly-70, Lys-119 to Arg-130. |
| 622140 | Preferred epitopes include those comprising a sequence |
| | shown in SEQ ID NO. 865 as residues: Ser-1 to Lys-6, |
| | Pro-16 to Ser-23, Arg-49 to Glu-58. |
| 647714 | Preferred epitopes include those comprising a sequence |
| | shown in SEQ ID NO. 867 as residues: Arg-1 to Gly-9, |
| | Glu-27 to Gly-36, Pro-72 to Phe-86, Pro-104 to Cys-111, |
| | Gln-145 to Lys-162, Arg-226 to Trp-233. |
| 652156 | Preferred epitopes include those comprising a sequence |
| | shown in SEQ ID NO. 871 as residues: Asn-30 to Ile-43, |
| | Ile-76 to Lys-81. |
| 653010 | Preferred epitopes include those comprising a sequence |
| | shown in SEQ ID NO. 872 as residues: Ser-1 to Ala-10. |
| 655904 | Preferred epitopes include those comprising a sequence |
| | shown in SEQ ID NO. 873 as residues: Ala-21 to |
| | Cys-27, Ser-76 to Gly-87, Ser-112 to Trp-121, Trp-128 |
| | to Asn-133, Glu-225 to Cys-231, Tyr-238 to Cys-248, |
| | Lys-269 to Asp-279, Phe-292 to Thr-298, Cys-357 to |
| | Ala-362, Pro-383 to Pro-388, Lys-412 to Lys-420. |
| 657852 | Preferred epitopes include those comprising a sequence |
| | shown in SEQ ID NO. 874 as residues: Arg-10 to Lys-22, |
| | Gln-48 to Glu-53, Arg-73 to Asn-86. |
| 666414 | Preferred epitopes include those comprising a sequence |
| | shown in SEQ ID NO. 875 as residues: Asn-9 to Lys-19, |
| | Arg-27 to Gly-32, Ser-58 to Thr-70, Ala-81 to Pro-86. |
| 670188 | Preferred epitopes include those comprising a sequence |
| | shown in SEQ ID NO. 877 as residues: Asn-68 to Ser-75. |
| 670279 | Preferred epitopes include those comprising a sequence |
| | shown in SEQ ID NO. 878 as residues: Lys-86 to |
| | Lys-91, Glu-101 to Val-120, Ala-130 to Glu-136. |
| 670729 | Preferred epitopes include those comprising a sequence |
| | shown in SEQ ID NO. 879 as residues: Ala-116 to Asp-134. |
| 676496 | Preferred epitopes include those comprising a sequence |
| | shown in SEQ ID NO. 881 as residues: Ile-1 to Arg-8. |
| 678248 | Preferred epitopes include those comprising a sequence |
| | shown in SEQ ID NO. 883 as residues: Ala-16 to Lys-22, |
| | Tyr-30 to Asn-35, Asp-61 to Val-70, Arg-129 to |
| | Asn-135, Thr-142 to Gly-148. |
| 683668 | Preferred epitopes include those comprising a sequence |
| | shown in SEQ ID NO. 884 as residues: Ser-3 to Gly-28, |
| | Gly-46 to Pro-56, Gly-70 to Ile-92, Gln-102 to Ser-117, |
| | Ala-123 to Pro-129, Pro-135 to Leu-140, Pro-150 to |
| | Asp-158, Pro-165 to Pro-177, Gln-188 to Asp-205, |
| | Ile-230 to Arg-245, His-251 to Trp-260, Asp-262 to |
| | Cys-267, Asn-296 to Arg-307, Glu-322 to Pro-330, |
| | Ile-351 to Asn-357, Asp-363 to Leu-369, Glu-386 to |
| | Phe-391, Lys-415 to Ser-420. |
| 693172 | Preferred epitopes include those comprising a sequence |
| | shown in SEQ ID NO. 885 as residues: Arg-11 to |
| | Arg-18, Pro-51 to Lys-58. |
| 694303 | Preferred epitopes include those comprising a sequence |
| | shown in SEQ ID NO. 886 as residues: Pro-12 to Ser-17, |
| | Leu-30 to Cys-39, Val-49 to Pro-54, Pro-67 to Leu-73, |
| | Pro-84 to Gln-90, His-99 to Leu-109. |
| 695042 | Preferred epitopes include those comprising a sequence |
| | shown in SEQ ID NO. 887 as residues: Ser-4 to Trp-28, |
| | Pro-51 to Leu-56, Asn-64 to His-70. |
| 699799 | Preferred epitopes include those comprising a sequence |
| | shown in SEQ ID NO. 888 as residues: Gln-17 to |
| | Phe-25, Glu-42 to Tyr-48, Val-52 to Gly-57, Pro-67 to |
| | Ser-73, Thr-97 to Gln-106, Gln-113 to Leu-123, Arg-171 |
| | to Asp-178, Arg-184 to Leu-191, Ile-195 to Phe-203, |
| | Lys-212 to Glu-217, Ala-236 to Asp-244, Arg-255 to |
| | Leu-260, Lys-266 to His-273, Glu-357 to Glu-363. |
| 703015 | Preferred epitopes include those comprising a sequence |
| | shown in SEQ ID NO. 890 as residues: Pro-27 to |
| | Asp-37, Gly-55 to Pro-61, His-96 to Ala-101, Glu-151 to |
| | Asn-156, Tyr-166 to Cys-178. |
| 706391 | Preferred epitopes include those comprising a sequence |
| | shown in SEQ ID NO. 891 as residues: Pro-22 to Ala-34, |
| | Pro-40 to Glu-52. |
| 706924 | Preferred epitopes include those comprising a sequence |
| | shown in SEQ ID NO. 893 as residues: Gly-1 to Gly-9, |
| | Gln-21 to Met-27. |
| 707642 | Preferred epitopes include those comprising a sequence |
| | shown in SEQ ID NO. 894 as residues: Glu-33 to |
| | Lys-40, Asn-55 to Lys-64, Tyr-104 to Cys-110, Ser-138 |
| | to Arg-148, Arg-157 to Gly-163, Lys-165 to Asn-172. |
| 710369 | Preferred epitopes include those comprising a sequence |
| | shown in SEQ ID NO. 895 as residues: Asn-1 to Thr-10. |
| 718826 | Peferred epitopes include those comprising a sequence |
| | shown in SEQ ID NO. 896 as residues: Ser-57 to |
| | Pro-63, Lys-93 to Ser-99. |
| 719790 | Preferred epitopes include those comprising a sequence |
| | shown in SEQ ID NO. 897 as residues: Phe-4 to Gln-23, |
| | Glu-47 to Ala-56, Asn-95 to Gln-102, Gln-109 to |
| | Glu-115, Arg-168 to Glu-175, Thr-196 to Arg-201, |
| | Lys-209 to Asp-215, Val-236 to Val-243. |
| 720222 | Preferred epitopes include those comprising a sequence |
| | shown in SEQ ID NO. 898 as residues: Glu-37 to Arg-43, |
| | Gly-62 to Pro-67, Gly-95 to Val-101, Gln-109 to |
| | Asp-114, Ala-137 to Phe-145, Asp-181 to Ser-188. |
| 724033 | Preferred epitopes include those comprising a sequence |
| | shown in SEQ ID NO. 899 as residues: Glu-55 to |
| | Glu-60, Asp-76 to Ser-85, Lys-106 to Asp-111, Gln-131 |
| | to Arg-137, Ala-172 to Gly-218. |
| 724767 | Preferred epitopes include those comprising a sequence |
| | shown in SEQ ID NO. 900 as residues: Leu-49 to |
| | Tyr-56, Tyr-114 to Glu-136, Arg-142 to Gly-148. |
| 727065 | Preferred epitopes include those comprising a sequence |
| | shown in SEQ ID NO. 901 as residues: Asn-41 to |
| | Gly-46, Lys-82 to His-88, Glu-107 to His-112, Leu-127 |
| | to Asp-132, Phe-163 to Phe-175, Thr-202 to Ile-209, |
| | Lys-229 to Gly-237, Ala-239 to Tyr-245. |
| 727246 | Preferred epitopes include those comprising a sequence |
| | shown in SEQ ID NO. 902 as residues: Pro-2 to Gly-10. |
| 739448 | Preferred epitopes include those comprising a sequence |
| | shown in SEQ ID NO. 908 as residues: His-2 to Leu-8, |
| | Gln-33 to Glu-40, Ala-44 to Glu-55, Gly-57 to Ser-67, |
| | Glu-70 to Ala-84, Glu-95 to Lys-111, Ile-186 to |
| | Asp-205, Leu-232 to Asp-238. |
| 740060 | Preferred epitopes include those comprising a sequence |
| | shown in SEQ ID NO. 910 as residues: Pro-44 to |
| | Thr-50, Arg-72 to Lys-80, Tyr-241 to Asn-251, Lys-273 |
| | to Gly-282, Ser-302 to Asn-312, Pro-337 to Ser-343, |
| | IIe-367 to Asp-376, Gly-395 to Tyr-417, Ser-442 |
| | to Gln-448. |
| 741560 | Preferred epitopes include those comprising a sequence |
| | shown in SEQ ID NO. 911 as residues: Gln-33 to Tyr-39, |
| | Pro-42 to Phe-47. |
| 742543 | Preferred epitopes include those comprising a sequence |
| | shown in SEQ ID NO. 912 as residues: Phe-10 to Tyr-15, |
| | Glu-139 to Asp-144, Glu-166 to Asn-171, Lys-175 to |
| | Glu-181. |
| 742831 | Preferred epitopes include those comprising a sequence |
| | shown in SEQ ID NO. 913 as residues: Val-64 to Glu-69. |
| 745327 | Preferred epitopes include those comprising a sequence |
| | shown in SEQ ID NO. 914 as residues: Arg-1 to Pro-13, |
| | Pro-54 to Ala-61. |
| 745695 | Preferred epitopes include those comprising a sequence |
| | shown in SEQ ID NO. 915 as residues: Trp-130 to |
| | Ser-135, Leu-199 to Thr-210, Ser-221 to Gln-229, |
| | Ala-249 to Tyr-255, Pro-257 to Pro-267, Ser-309 |
| | to Arg-314. |
| 750316 | Preferred epitopes include those comprising a sequence |
| | shown in SEQ ID NO. 916 as residues: Pro-18 to |
| | Asn-24, Thr-65 to Asp-70. |
| 750522 | Preferred epitopes include those comprising a sequence |
| | shown in SEQ ID NO. 917 as residues: |
| | Gln-10 to Lys-15. |
| 750583 | Preferred epitopes include those comprising a sequence |
| | shown in SEQ ID NO. 918 as residues: Lys-9 to Thr-15, |
| | Gln-32 to Gln-40. |
| 751020 | Preferred epitopes include those comprising a sequence |
| | shown in SEQ ID NO. 919 as residues: Arg-39 to |
| | Leu-47, Ser-107 to Ile-117, Pro-135 to Gln-144. |
| 752196 | Preferred epitopes include those comprising a sequence |
| | shown in SEQ ID NO. 920 as residues: |
| | Lys-20 to Lys-28. |
| 753084 | Preferred epitopes include those comprising a sequence |
| | shown in SEQ ID NO. 921 as residues: Lys-84 to |
| | Thr-98, Arg-128 to Ser-134, Arg-244 to Asn-252, |
| | Lys-365 to His-372. |
| 754957 | Preferred epitopes include those comprising a sequence |
| | shown in SEQ ID NO. 922 as residues: Pro-101 to |
| | Glu-106, Glu-116 to Asp-127, Ser-199 to Ile-210, |
| | Asp-217 to Asp-229, Ser-239 to Gly-244, Gln-262 to |
| | Asn-273, Pro-279 to Ser-284, Lys-318 to Arg-326, |
| | Lys-334 to Ile-341. |
| 756557 | Preferred epitopes include those comprising a sequence |
| | shown in SEQ ID NO. 923 as residues: Val-13 to Phe-21, |
| | Ile-55 to Pro-63, Ser-69 to Leu-74, Arg-82 to Leu-96, |
| | Asn-131 to Leu-139, Ile-156 to Thr-164, Thr-241 to |
| | Leu-249, Gly-273 to Ser-279, Thr-282 to Arg-289. |
| 756712 | Preferred epitopes include those comprising a sequence |
| | shown in SEQ ID NO. 924 as residues: Ile-4 to Thr-37, |
| | Gln-42 to Ser-48, Asn-56 to Lys-69, Ser-79 to Ser-85. |
| 757414 | Preferred epitopes include those comprising a sequence |
| | shown in SEQ ID NO. 925 as residues: Glu-14 to Thr-23, |
| | His-50 to Arg-62, Tyr-72 to Cys-78, Gly-121 to Pro-128. |
| 757614 | Preferred epitopes include those comprising a sequence |
| | shown in SEQ ID NO. 926 as residues: Gly-13 to |
| | Cys-19, Thr-32 to Glu-38, Val-44 to Gln-53, Lys-55 to |
| | Asp-60, Gln-65 to Glu-70, Lys-89 to Glu-105, Glu-112 |
| | to Asp-142, Glu-147 to Arg-152, Glu-211 to Leu-216, |
| | Leu-227 to Ser-232, Lys-245 to Lys-255, Glu-278 to |
| | Tyr-291, Gln-297 to Arg-303. |
| 759878 | Preferred epitopes include those comprising a sequence |
| | shown in SEQ ID NO. 928 as residues: Trp-16 to Glu-21, |
| | Trp-45 to Pro-54, Ile-154 to Phe-162, Gly-174 to |
| | Leu-181. |
| 760227 | Preferred epitopes include those comprising a sequence |
| | shown in SEQ ID NO. 929 as residues: |
| | Arg-99 to Asp-104. |
| 766051 | Preferred epitopes include those comprising a sequence |
| | shown in SEQ ID NO. 931 as residues: |
| | Asp-10 to Lys-19. |
| 768053 | Preferred epitopes include those comprising a sequence |
| | shown in SEQ ID NO. 933 as residues: Ile-1 to Tyr-7, |
| | Phe-52 to Cys-61, Val-118 to Ser-125. |
| 768055 | Preferred epitopes include those comprising a sequence |
| | shown in SEQ ID NO. 934 as residues: Asp-39 to Ser-46, |
| | Lys-92 to Lys-99, Val-165 to Phe-172, Lys-252 to |
| | Ala-261, Asn-268 to Ala-273. |
| 769685 | Preferred epitopes include those comprising a sequence |
| | shown in SEQ ID NO. 935 as residues: |
| | Pro-129 to Arg-135. |
| 771920 | Preferred epitopes include those comprising a sequence |
| | shown in SEQ ID NO. 936 as residues: Pro-47 to Val-53, |
| | Asp-85 to Phe-97, Val-136 to Gly-144, Pro-166 to |
| | Glu-172, Leu-190 to Ser-197. |
| 772790 | Preferred epitopes include those comprising a sequence |
| | shown in SEQ ID NO. 937 as residues: Leu-5 to Trp-13, |
| | Met-20 to Leu-39, Ile-50 to Pro-63, Glu-66 to Ser-72, |
| | Leu-112 to Gln-120, Ala-141 to Lys-146, Tyr-165 to |
| | Asp-173. |
| 772916 | Preferred epitopes include those comprising a sequence |
| | shown in SEQ ID NO. 938 as residues: |
| | Lys-16 to Arg-25. |
| 773632 | Preferred epitopes include those comprising a sequence |
| | shown in SEQ ID NO. 940 as residues: Arg-1 to His-33. |
| 774364 | Preferred epitopes include those comprising a sequence |
| | shown in SEQ ID NO. 941 as residues: |
| | Ser-97 to Asn-103. |
| 775355 | Preferred epitopes include those comprising a sequence |
| | shown in SEQ ID NO. 942 as residues: |
| | Ser-40 to Ala-46. |
| 775844 | Preferred epitopes include those comprising a sequence |
| | shown in SEQ ID NO. 943 as residues: Leu-20 to |
| | Ser-31, Thr-38 to Val-47. |
| 777760 | Preferred epitopes include those comprising a sequence |
| | shown in SEQ ID NO. 944 as residues: Thr-22 to Ser-28, |
| | Thr-35 to Glu-42, Met-47 to Thr-55. |
| 779837 | Preferred epitopes include those comprising a sequence |
| | shown in SEQ ID NO. 945 as residues Thr-26 to Arg-31, |
| | Leu-75 to Lys-100. |
| 780769 | Preferred epitopes include those comprising a sequence |
| | shown in SEQ ID NO. 946 as residues: Gly-1 to Asp-7, |
| | Lys-25 to Lys-31, Tyr-65 to Gly-70, Thr-100 to Arg-106, |
| | Pro-118 to Glu-124, Lys-162 to Ser-172, Leu-176 to |
| | Leu-182. |
| 781445 | Preferred epitopes include those comprising a sequence |
| | shown in SEQ ID NO. 947 as residues: Asn-33 to |
| | Lys-38, Leu-67 to Met-73, Ser-111 to Lys-121, Lys-127 |
| | to Leu-134, Pro-153 to Trp-158, Lys-237 to Met-249, |
| | Pro-280 to Tyr-292. |
| 781531 | Preferred epitopes include those comprising a sequence |
| | shown in SEQ ID NO. 948 as residues: Ala-8 to Pro-23, |
| | Gln-56 to Cys-61, Asn-66 to Pro-72. |
| 783018 | Preferred epitopes include those comprising a sequence |
| | shown in SEQ ID NO. 949 as residues: Asn-4 to Leu-17, |
| | Gly-19 to Phe-26, Pro-37 to Glu-43, Val-58 to Ser-64, |
| | Gln-80 tp Gly-85. |
| 783097 | Preferred epitopes include those comprising a sequence |
| | shown in SEQ ID NO. 950 as residues: Pro-1 to Asp-9, |
| | Pro-24 to Gly-40, Pro-47 to Thr-55, Gln-62 to Ser-76. |
| 784198 | Preferred epitopes include those comprising a sequence |
| | shown in SEQ ID NO. 951 as residues: Met-1 to Arg-15, |
| | Leu-43 to Glu-48, Asp-55 to Asp-62, Ser-111 |
| | to Lys-160. |
| 784868 | Preferred epitopes include those comprising a sequence |
| | shown in SEQ ID NO. 952 as residues: Trp-8 to Gly-17, |
| | Glu-20 to Arg-35, Gly-40 to Cys-45, Ser-59 to Ser-64, |
| | Ala-73 to Leu-78, Val-85 to Leu-91, Arg-130 to |
| | Lys-135, Leu-138 to Glu-146, Pro-188 to Pro-194, |
| | Ser-206 to Cys-212, Ser-232 to Ala-246, Asp-293 to Ser-298. |
| 785428 | Preferred epitopes include those comprising a sequence |
| | shown in SEQ ID NO. 953 as residues: Arg-9 to Met-20, |
| | Glu-28 to Gly-33, Asn-49 to Lys-57, Thr-67 to Arg-75, |
| | Ser-81 to Leu-87, Glu-103 to Thr-109, Pro-115 to |
| | Ile-120, Asn-146 to Ser-174, Ser-177 to His-195, |
| | Met-197 to Ile-221, Asp-232 to Glu-240, Glu-289 to |
| | Phe-302, Cys-306 to Arg-314, Ser-357 to Ser-366, |
| | Lys-385 to Glu-401, Val-419 to Asp-427. |
| 785845 | Preferred epitopes include those comprising a sequence |
| | shown in SEQ ID NO. 954 as residues: Arg-41 to |
| | Asp-52, Pro-82 to Arg-94, Pro-102 to Gln-107, Gln-170 |
| | to Tyr-181, Glu-248 to Lys-254, Asp-277 to Gly-287, |
| | Ala-302 to Arg-308, Thr-367 to Gly-374. |
| 785854 | Preferred epitopes include those comprising a sequence |
| | shown in SEQ ID NO. 955 as residues: Asp-1 to |
| | Asp-17, Cys-59 to Asp-65. |
| 787279 | Preferred epitopes include those comprising a sequence |
| | shown in SEQ ID NO. 958 as residues: |
| | Lys-13 to Lys-20. |
| 789002 | Preferred epitopes include those comprising a sequence |
| | shown in SEQ ID NO. 959 as residues: |
| | Met-20 to Glu-29. |
| 789008 | Preferred epitopes include those comprising a sequence |
| | shown in SEQ ID NO. 960 as residues: Ser-24 to |
| | Arg-33, Ile-44 to Gly-57, Arg-63 to Asn-72, Ile-76 to |
| | Pro-82. |
| 789555 | Preferred epitopes include those comprising a sequence |
| | shown in SEQ ID NO. 961 as residues: Trp-106 to |
| | Thr-117, Trp-156 to Gln-163, Gln-173 to Asp-178, |
| | Gln-227 to Glu-233, Gln-255 to Glu-261, Glu-297 to |
| | Tyr-306, Thr-339 to Val-345, Leu-378 to Ile-385, |
| | Asp-414 to Lys-420, Cys-437 to Ile-444, Thr-491 to |
| | Gln-497, Glu-509 to Ser-515, Lys-526 to Glu-538. |
| 789631 | Preferred epitopes include those comprising a sequence |
| | shown in SEQ ID NO. 962 as residues: |
| | Thr-10 to Gly-18. |
| 789779 | Preferred epitopes include those comprising a sequence |
| | shown in SEQ ID NO. 963 as residues: Glu-1 to Ala-13, |
| | Leu-103 to Ser-109. |
| 790387 | Preferred epitopes include those comprising a sequence |
| | shown in SEQ ID NO. 964 as residues: His-1 to Ala-12. |
| 790461 | Preferred epitopes include those comprising a sequence |
| | shown in SEQ ID NO. 965 as residues: Glu-14 to |
| | Gly-23, Asp-47 to Met-53, Ala-55 to Thr-60, Pro-67 to |
| | Thr-73, Pro-78 to Gly-86, Tyr-91 to Pro-101, Ala-133 |
| | to Asn-139, Glu-169 to Gln-182, Glu-189 to Thr-195, |
| | Asn-197 to Arg-203, Gln-265 to Asp-271. |
| 790931 | Preferred epitopes include those comprising a sequence |
| | shown in SEQ ID NO. 966 as residues: Val-3 to Glu-13, |
| | Pro-29 to Pro-35, Glu-116 to Arg-125. |
| 791176 | Preferred epitopes include those comprising a sequence |
| | shown in SEQ ID NO. 967 as residues: Pro-1 to Pro-10, |
| | Pro-17 to Phe-28, Ser-61 to Pro-67. |
| 792539 | Preferred epitopes include those comprising a sequence |
| | shown in SEQ ID NO. 969 as residues: Ser-12 to Trp-17, |
| | Gln-20 to Lys-29, Asp-45 to Glu-51, Tyr-75 to Lys-83, |
| | Arg-103 to Gly-119, Gln-145 to Lys-155, Lys-166 to |
| | Leu-180, Thr-195 to Gly-203, Gln-209 to Val-219, |
| | Ser-222 to Ala-244, Leu-251 to Leu-260, Lys-277 |
| | to Lys-285. |
| 792749 | Preferred epitopes include those comprising a sequence |
| | shown in SEQ ID NO. 970 as residues: Ala-22 to |
| | Asp-41, Thr-61 to Met-66, Asp-191 to Lys-198, Arg-280 |
| | to Phe-287, Thr-289 to Lys-299, Pro-325 to Asp-332, |
| | Ser-351 to Arg-357. |
| 793206 | Preferred epitopes include those comprising a sequence |
| | shown in SEQ ID NO. 972 as residues: Gly-1 to Arg-6, |
| | Gln-11 to Arg-22, Glu-86 to Asp-91. |
| 793626 | Preferred epitopes include those comprising a sequence |
| | shown in SEQ ID NO. 974 as residues: Ser-1 to Gly-13, |
| | Gly-17 to Asn-26. |
| 794417 | Preferred epitopes include those comprising a sequence |
| | shown in SEQ ID NO. 975 as residues: Ser-7 to Trp-16. |
| 795197 | Preferred epitopes include those comprising a sequence |
| | shown in SEQ ID NO. 976 as residues: Ser-67 to |
| | Glu-73, Arg-129 to Gly-136, Phe-154 to Ala-161, |
| | Tyr-198 to Tyr-203, Pro-206 to Asp-212, |
| | Glu-222 to Cys-231. |
| 795251 | Preferred epitopes include those comprising a sequence |
| | shown in SEQ ID NO. 977 as residues: Phe-44 to Ser-50, |
| | Asp-57 to Pro-62, Asn-80 to His-90, Ser-110 to Ala-115, |
| | Ile-141 to Val-148, Glu-155 to Thr-173, Val-202 to |
| | Pro-217, Ile-221 to Val-229, Thr-233 to Ser-243, |
| | Val-253 to Thr-259, Ala-290 to Asn-320, Pro-322 to |
| | Ile-330, Ala-333 to Met-344, Val-362 to Leu-367, |
| | Asp-397 to Val-402, Glu-422 to Gly-448, Met-453 to |
| | Gly-460. |
| 795752 | Preferred epitopes include those comprising a sequence |
| | shown in SEQ ID NO. 978 as residues: Pro-52 to |
| | Asn-63, Pro-70 to Ile-79, Arg-93 to Gln-111. |
| 796261 | Preferred epitopes include those comprising a sequence |
| | shown in SEQ ID NO. 979 as residues: His-1 to Val-6, |
| | Cys-10 to Ser-15, Gly-26 to Ser-34, Trp-36 to Pro-58, |
| | Pro-96 to Thr-102, Pro-111 to Tyr-116, Phe-131 to |
| | Gly-138, Pro-184 to Leu-190, Glu-237 to Gly-244, |
| | Pro-255 to Lys-267, Lys-271 to Leu-280. |
| 796933 | Preferred epitopes include those comprising a sequence |
| | shown in SEQ ID NO. 980 as residues: Arg-1 to Pro-14, |
| | Gln-47 to Cys-52, Asn-57 to Pro-63, Ser-277 to Lys-282. |
| 799424 | Preferred epitopes include those comprising a sequence |
| | shown in SEQ ID NO. 981 as residues: Tyr-18 to |
| | Leu-27, Met-50 to Met-60, Leu-169 to His-178, |
| | Ser-233 to Ser-241. |
| 799698 | Preferred epitopes include those comprising a sequence |
| | shown in SEQ ID NO. 982 as residues: Pro-16 to |
| | Pro-21, Ala-54 to Glu-61, Ala-96 to Gly-105. |
| 800351 | Preferred epitopes include those comprising a sequence |
| | shown in SEQ ID NO. 983 as residues: Gly-21 to |
| | Gln-34, His-39 to Lys-53, Ser-63 to Tyr-71. |
| 800573 | Preferred epitopes include those comprising a sequence |
| | shown in SEQ ID NO. 984 as residues: Asp-33 to |
| | Arg-39, Ala-43 to Leu-48, Glu-256 to Gln-266, Gly-305 |
| | to Ile-311, Pro-314 to Ala-320, Gln-388 to Asn-394. |
| 805815 | Preferred epitopes include those comprising a sequence |
| | shown in SEQ ID NO. 985 as residues: Arg-1 to Lys-22, |
| | Ser-34 to Arg-48, Thr-64 to Arg-70, Pro-81 to Phe-89, |
| | Arg-148 to Asn-154, Tyr-172 to Asp-185, Ser-205 to |
| | Asp-216, Tyr-278 to His-285, His-294 to Pro-299, |
| | Glu-326 to Gly-333, Gly-336 to Ser-345. |
| 806445 | Preferred epitopes include those comprising a sequence |
| | shown in SEQ ID NO. 986 as residues: Arg-15 to |
| | Gly-24, Lys-26 to Trp-32. |
| 810309 | Preferred epitopes include those comprising a sequence |
| | shown in SEQ ID NO. 987 as residues: Pro-33 to |
| | Phe-50, Ile-57 to Gly-62, Gln-72 to Asn-85, Ala-87 |
| | to Thr-172. |
| 811022 | Preferred epitopes include those comprising a sequence |
| | shown in SEQ ID NO. 988 as residues: Ala-1 to Met-11, |
| | Gln-62 to Trp-68, Ala-89 to Val-99. |
| 811023 | Preferred epitopes include those comprising a sequence |
| | shown in SEQ ID NO. 989 as residues: Tyr-54 to |
| | Lys-61, Met-64 to Thr-70. |
| 811143 | Preferred epitopes include those comprising a sequence |
| | shown in SEQ ID NO. 990 as residues: Ala-1 to Ser-7, |
| | Ser-19 to Gly-36, Arg-53 to Pro-58, Thr-87 to Glu-102, |
| | Arg-115 to Tyr-120, Thr-159 to Thr-164, Ala-171 to |
| | Ser-179, Ala-206 to Pro-217, Pro-224 to Ala-233, |
| | Arg-253 to Ser-259. |
| 813000 | Preferred epitopes include those comprising a sequence |
| | shown in SEQ ID NO. 993 as residues: Tyr-25 to Lys-30, |
| | Lys-36 to Ile-43, Lys-52 to Gln-69, Glu-76 to Asp-81, |
| | Arg-92 to Trp-104, Leu-120 to Lys-126, Ser-129 to |
| | Ser-135, Ser-139 to Thr-156, Pro-165 to Glu-178, |
| | Ser-181 to Thr-186, Tyr-196 to Lys-201, Cys-225 to |
| | Lys-230, Glu-234 to Ser-242. |
| 813431 | Preferred epitopes include those comprising a sequence |
| | shown in SEQ ID NO. 995 as residues: Leu-23 to His-29, |
| | Pro-38 to Leu-46, Ser-59 to Gly-68, Pro-85 to Lys-108, |
| | Arg-119 to Phe-124, Ser-139 to Lys-156. |
| 813450 | Preferred epitopes include those comprising a sequence |
| | shown in SEQ ID NO. 996 as residues: Asn-1 to Trp-10. |
| 813478 | Preferred epitopes include those comprising a sequence |
| | shown in SEQ ID NO. 997 as residues: Ala-8 to Arg-14, |
| | Ile-64 to Thr-69, Val-94 to Asp-101, His-112 to Gln-117, |
| | Tyr-139 to Glu-145, Tyr-195 to Cys-208, Gly-216 to |
| | Gly-223, Asp-297 to Ser-307, Gly-375 to Leu-383, |
| | Ile-391 to Pro-404, Asn-451 to Ser-466. |
| 813505 | Preferred epitopes include those comprising a sequence |
| | shown in SEQ ID NO. 998 as residues: Thr-1 to Ala-20, |
| | Pro-22 to Lys-27, His-44 to Thr-51, Pro-53 to Thr-60, |
| | Arg-62 to Lys-79, Lys-97 to Asn-103, Pro-139 |
| | to Lys-144. |
| 815552 | Preferred epitopes include those comprising a sequence |
| | shown in SEQ ID NO. 999 as residues: Pro-1 to Ser-6, |
| | Pro-25 to Cys-31, Arg-142 to Lys-150. |
| 815606 | Preferred epitopes include those comprising a sequence |
| | shown in SEQ ID NO. 1000 as residues: Arg-1 to Ala-11. |
| 816048 | Preferred epitopes include those comprising a sequence |
| | shown in SEQ ID NO. 1001 as residues: Ala-13 to |
| | Thr-24, Glu-30 to Gln-39, Arg-69 to Gly-77, |
| | Gln-119 to Gly-126, Tyr-156 to Asn-162, |
| | Ser-184 to Gly-191. |
| 823981 | Preferred epitopes include those comprising a sequence |
| | shown in SEQ ID NO. 1004 as residues: Lys-1 to Cys-7, |
| | Ala-11 to Lys-17, Glu-90 to Ile-95, Asn-141 to Arg-148, |
| | Leu-158 to Ala-163, Ala-171 to Thr-177. |
| 824364 | Preferred epitopes include those comprising a sequence |
| | shown in SEQ ID NO. 1005 as residues: |
| | Gln-43 to Gly-54. |
| 824423 | Preferred epitopes include those comprising a sequence |
| | shown in SEQ ID NO. 1006 as residues: Cys-33 to |
| | Arg-42, Val-53 to Met-63, Lys-71 to Lys-78, Gly-107 to |
| | Pro-118, Ala-159 to Leu-165, Val-272 to Arg-284, |
| | Pro-422 to Pro-427, Arg-437 to Gln-443, Ala-474 to |
| | Asp-482, His-519 to Cys-525, Ala-529 to Gln-535, |
| | Arg-540 to Gln-548. |
| 825279 | Preferred epitopes include those comprising a sequence |
| | shown in SEQ ID NO. 1007 as residues: Ser-8 to Arg-14, |
| | Asp-23 to Gly-28, Ser-30 to Pro-37, His-52 to Ala-57, |
| | Pro-65 to Ser-74, Pro-112 to Ser-118, Ala-181 to |
| | Pro-189. |
| 825548 | Preferred epitopes include those comprising a sequence |
| | shown in SEQ ID NO. 1009 as residues: Pro-2 to Ser-9. |
| 825725 | Preferred epitopes include those comprising a sequence |
| | shown in SEQ ID NO. 1010 as residues: Pro-1 to Gly-8, |
| | Leu-95 to Lys-100, Glu-118 to Thr-125, Ser-162 to |
| | Lys-167, Arg-201 to Tyr-206. |
| 827079 | Preferred epitopes include those comprising a sequence |
| | shown in SEQ ID NO. 1012 as residues: Arg-9 to Ser-17. |
| 827153 | Preferred epitopes include those comprising a sequence |
| | shown in SEQ ID NO. 1013 as residues: Val-32 to |
| | Ala-44, Pro-49 to Ser-57, Gln-77 to Gly-82, Asp-116 |
| | to Gly-127, Arg-165 to Asn-172. |
| 827351 | Preferred epitopes include those comprising a sequence |
| | shown in SEQ ID NO. 1014 as residues: Gly-5 to |
| | Lys-11, Ser-59 to Lys-67, Glu-130 to Arg-136, Asn-176 |
| | to Leu-183. |
| 827503 | Preferred epitopes include those comprising a sequence |
| | shown in SEQ ID NO. 1015 as residues: Asp-61 to |
| | Val-67, Arg-113 to Asp-119, Ser-180 to Gly-191, |
| | Pro-199 to Ser-211, Ser-228 to Asn-238, Gly-276 to |
| | Ser-286, His-343 to Gly-351, Gln-354 to Arg-366, |
| | Leu-368 to Gln-382, Pro-393 to Ser-400, Asp-412 to |
| | Cys-418, Gly-430 to Leu-435, Gln-445 to Asp-450, |
| | Lys-484 to Val-491, Leu-513 to Gly-520. |
| 827563 | Preferred epitopes include those comprising a sequence |
| | shown in SEQ ID NO. 1016 as residues: Pro-69 to |
| | Ala-81, Pro-84 to Gly-9l, Ala-106 to Leu-112, Arg-216 |
| | to Lys-224, Trp-239 to Gly-250. |
| 827565 | Preferred epitopes include those comprising a sequence |
| | shown in SEQ ID NO. 1017 as residues: Ala-1 to Ser-8, |
| | Ser-88 to Gly-96, Asn-121 to Asp-128, Cys-191 to |
| | Gly-196, Met-242 to Thr-248. |
| 827893 | Preferred epitopes include those comprising a sequence |
| | shown in SEQ ID NO. 1018 as residues: Ser-41 to |
| | Ala-50, Glu-72 to His-77, Ala-120 to Glu-125, Thr-144 |
| | to Ile-153. |
| 828072 | Preferred epitopes include those comprising a sequence |
| | shown in SEQ ID NO. 1019 as residues: |
| | Lys-30 to Leu-35. |
| 828241 | Preferred epitopes include those comprising a sequence |
| | shown in SEQ ID NO. 1021 as residues: Gly-35 to |
| | Phe-45, Pro-47 to Arg-55, Glu-62 to Leu-70, Arg-102 to |
| | Tyr-111, Phe-128 to Gln-134, Val-139 to Met-144, |
| | Ser-180 to Gly-188, Lys-214 to Leu-219, Ser-241 to |
| | Glu-246, Phe-292 to Thr-298. |
| 828287 | Preferred epitopes include those comprising a sequence |
| | shown in SEQ ID NO. 1022 as residues: Ala-12 to |
| | Thr-21, Ala-23 to Gly-31, Leu-43 to Gly-51, Lys-127 to |
| | Val-134. |
| 828371 | Preferred epitopes include those comprising a sequence |
| | shown in SEQ ID NO. 1024 as residues: Gln-1 to Ala-6, |
| | Lys-50 to Pro-71, Pro-98 to Ser-111, Asp-148 to |
| | His-164, Asp-185 to Arg-191, Asp-238 to Gly-244, |
| | Pro-262 to Cys-274. |
| 828403 | Preferred epitopes include those comprising a sequence |
| | shown in SEQ ID NO. 1025 as residues: Gly-1 to Trp-15, |
| | Arg-73 to Leu-82. |
| 828501 | Preferred epitopes include those comprising a sequence |
| | shown in SEQ ID NO. 1026 as residues: Arg-99 to |
| | Arg-105, Pro-171 to Ser-176, Lys-189 to Val-195, |
| | Lys-291 to Ala-296. |
| 828527 | Preferred epitopes include those comprising a sequence |
| | shown in SEQ ID NO. 1028 as residues: |
| | Glu-58 to Cys-63. |
| 828538 | Preferred epitopes include those comprising a sequence |
| | shown in SEQ ID NO. 1029 as residues: Pro-9 to Thr-24, |
| | Thr-46 to Gly-52, Ser-70 to Thr-76, Ser-142 to Thr-149, |
| | Pro-154 to Ser-171, Glu-189 to Ser-196. |
| 828541 | Preferred epitopes include those comprising a sequence |
| | shown in SEQ ID NO. 1030 as residues: Arg-9 to Pro-23, |
| | Gln-64 to Leu-69, Asp-76 to Asn-83, Lys-88 to Gln-93, |
| | Pro-129 to Thr-135, Gly-194 to Gly-203, Asp-223 to |
| | Gly-231, Thr-265 to Ile-281, Leu-287 to Lys-297. |
| 828549 | Preferred epitopes include those comprising a sequence |
| | shown in SEQ ID NO. 1031 as residues: |
| | Pro-22 to Asn-28. |
| 828562 | Preferred epitopes include those comprising a sequence |
| | shown in SEQ ID NO. 1032 as residues: Arg-26 to |
| | Asp-33, Asp-42 to Pro-58, Thr-63 to Lys-70, Thr-103 |
| | to Asp-114. |
| 828576 | Preferred epitopes include those comprising a sequence |
| | shown in SEQ ID NO. 1033 as residues: Arg-11 to |
| | Gly-17, Pro-26 to Gly-31, Ala-48 to His-58. |
| 828602 | Preferred epitopes include those comprising a sequence |
| | shown in SEQ ID NO. 1034 as residues: Tyr-1 to Met-8, |
| | Leu-10 to Lys-26, Pro-47 to Pro-54, Lys-128 to Ser-133. |
| 828628 | Preferred epitopes include those comprising a sequence |
| | shown in SEQ ID NO. 1035 as residues: Thr-124 to |
| | Thr-129, Gly-136 to Phe-142, Asp-164 to His-171, |
| | Asp-180 to Tyr-194. |
| 828684 | Preferred epitopes include those comprising a sequence |
| | shown in SEQ ID NO. 1037 as residues: Ser-16 to |
| | Thr-22, Arg-39 to Ala-51, Arg-60 to Gly-65, Thr-67 to |
| | Arg-90, Lys-109 to Gln-125, Ser-146 to Arg-159, |
| | Gln-166 to Thr-176, Glu-192 to Tyr-197, Val-267 to |
| | His-279, Ala-351 to Gly-356, Phe-363 to Gly-368, |
| | Gly-387 to Arg-392, Asp-488 to Ala-498. |
| 828727 | Preferred epitopes include those comprising a sequence |
| | shown in SEQ ID NO. 1038 as residues: Gly-14 to |
| | Val-21, Asp-40 to Gln-57, Gln-86 to Tyr-93, Gln-98 to |
| | Asp-104, Lys-124 to Asp-130, Gln-138 to Cys-156, |
| | Tyr-170 to Gln-175, Gln-196 to Ala-201. |
| 828734 | Preferred epitopes include those comprising a sequence |
| | shown in SEQ ID NO. 1039 as residues: Asp-5 to |
| | Trp-19, Ile-37 to Pro-42, Asp-52 to Asp-72, Glu-85 to |
| | Ser-92, Ser-107 to Leu-117, Asp-128 to His-147. |
| 828842 | Preferred epitopes include those comprising a sequence |
| | shown in SEQ ID NO. 1041 as residues: Ala-25 to |
| | Phe-32, Glu-54 to Ser-61, Thr-74 to Glu-79, Glu-99 to |
| | Lys-105, Glu-112 to Glu-121. |
| 828843 | Preferred epitopes include those comprising a sequence |
| | shown in SEQ ID NO. 1042 as residues: Pro-3 to |
| | Asn-11, Gln-46 to Ala-51, Asn-62 to Lys-74, Val-108 to |
| | Gln-113, Arg-119 to Gly-163, Ala-223 to Lys-237. |
| 828851 | Preferred epitopes include those comprising a sequence |
| | shown in SEQ ID NO. 1043 as residues: Thr-3 to Lys-8, |
| | Leu-63 to Val-70, Lys-141 to Val-149, Ile-326 to |
| | Thr-333. |
| 828856 | Preferred epitopes include those comprising a sequence |
| | shown in SEQ ID NO. 1044 as residues: |
| | Leu-1 to Gly-10. |
| 828862 | Preferred epitopes include those comprising a sequence |
| | shown in SEQ ID NO. 1045 as residues: Pro-1 to Pro-9, |
| | Arg-81 to Glu-87, Gln-114 to Glu-119. |
| 828870 | Preferred epitopes include those comprising a sequence |
| | shown in SEQ ID NO. 1046 as residues: Ser-1 to Gly-18, |
| | Trp-25 to Gly-3l, Arg-46 to Ser-52, Ala-103 to Ala-108, |
| | Ser-154 to Gly-165, Gln-228 to Pro-236, Ser-284 to |
| | Gly-291, Ala-321 to Asp-327, Lys-377 to Asn-394, |
| | Asp-406 to Ser-416. |
| 828873 | Preferred epitopes include those comprising a sequence |
| | shown in SEQ ID NO. 1047 as residues: Tyr-15 to |
| | Gly-20, Asn-72 to Asp-80, Pro-105 to Pro-110, Gln-149 |
| | to Arg-154, Glu-161 to Gly-167, Ile-312 to Asp-318, |
| | Lys-353 to Leu-361, Arg-379 to Thr-385, Pro-423 to |
| | Trp-435, Pro-437 to Cys-444, Asn-450 to Met-466. |
| 828892 | Preferred epitopes include those comprising a sequence |
| | shown in SEQ ID NO. 1048 as residues: Asp-19 to |
| | Asn-25, Gly-67 to Glu-79. |
| 828893 | Preferred epitopes include those comprising a sequence |
| | shown in SEQ ID NO. 1049 as residues: Ser-55 to |
| | Thr-60, Glu-97 to Ser-103, Thr-164 to Glu-170, Gly-192 |
| | to Gly-197, Leu-204 to Ser-218, Ala-238 to Ser-250, |
| | Asp-265 to Tyr-292, Gly-298 to Gly-307, Gly-351 to |
| | Met-359, Phe-389 to Glu-400. |
| 828897 | Preferred epitopes include those comprising a sequence |
| | shown in SEQ ID NO. 1050 as residues: |
| | Phe-28 to Arg-33. |
| 828910 | Preferred epitopes include those comprising a sequence |
| | shown in SEQ ID NO. 1051 as residues: His-1 to |
| | Ile-13, Arg-20 to Glu-64, Arg-83 to Gln-89, Tyr-145 |
| | to Asp-152. |
| 828927 | Preferred epitopes include those comprising a sequence |
| | shown in SEQ ID NO. 1052 as residues: Glu-10 to |
| | Pro-21, Thr-54 to Gly-60, Cys-79 to Glu-90, Lys-154 |
| | to Lys-159. |
| 828932 | Preferred epitopes include those comprising a sequence |
| | shown in SEQ ID NO. 1053 as residues: Arg-1 to Arg-9, |
| | Phe-54 to Pro-60, Gln-74 to Gly-90, Asn-114 to Gly-119, |
| | Cys-124 to Ser-132, Thr-139 to Leu-151, Asp-171 to |
| | Lys-182, Ala-188 to Leu-193, Val-203 to Trp-222, |
| | Lys-230 to Glu-236, Glu-244 to Asp-250, Leu-258 to |
| | Gly-268, Gly-283 to Asp-288, Ser-291 to Trp-297, |
| | Gly-300 to Ala-308. |
| 828933 | Preferred epitopes include those comprising a sequence |
| | shown in SEQ ID NO. 1054 as residues: Glu-21 to |
| | Ser-34, Thr-130 to Tyr-138. |
| 828941 | Preferred epitopes include those comprising a sequence |
| | shown in SEQ ID NO. 1055 as residues: Gly-1 to Ala-6, |
| | Pro-15 to Gly-22, Asn-160 to Gln-177, Asn-193 to |
| | Asp-199, Glu-205 to Leu-211. |
| 828963 | Preferred epitopes include those comprising a sequence |
| | shown in SEQ ID NO. 1057 as residues: Pro-48 to |
| | Gly-54, Ser-56 to Ser-76, Lys-102 to Pro-107, Ser-146 |
| | to Gly-153, Ser-208 to Arg-213, Tyr-285 to Leu-299, |
| | Pro-314 to Phe-319, Asn-322 to Asn-327. |
| 828964 | Preferred epitopes include those comprising a sequence |
| | shown in SEQ ID NO. 1058 as residues: |
| | Thr-36 to Cys-47. |
| 828966 | Preferred epitopes include those comprising a sequence |
| | shown in SEQ ID NO. 1059 as residues: Gly-1 to Ser-16, |
| | Met-26 to Pro-31, Lys-128 to Glu-134, His-165 to |
| | Gln-170, Asp-207 to Asn-216, Pro-348 to Arg-359, |
| | Lys-433 to Ala-439, Gly-448 to Tyr-457. |
| 828967 | Preferred epitopes include those comprising a sequence |
| | shown in SEQ ID NO. 1060 as residues: Met-135 to |
| | Arg-141, Gly-149 to Lys-166, Ile-188 to Ser-196, |
| | Gly-203 to Tyr-213, Gln-267 to Asp-278, Arg-298 to |
| | Trp-317, Leu-319 to Leu-326, Gln-344 to Thr-349, |
| | Pro-410 to Ser-419, Ala-500 to Ala-510. |
| 828977 | Preferred epitopes include those comprising a sequence |
| | shown in SEQ ID NO. 1061 as residues: Gly-32 to |
| | Tyr-42, Asn-52 to Glu-58, Ser-78 to Gly-87, Lys-97 to |
| | Gly-109, Glu-116 to Arg-127, Pro-147 to Pro-152, |
| | Pro-162 to Asn-171, Leu-179 to Glu-185, Ile-203 to |
| | Glu-208, Val-222 to Gln-228. |
| 828978 | Preferred epitopes include those comprising a sequence |
| | shown in SEQ ID NO. 1062 as residues: Asp-24 to |
| | Lys-30, Arg-49 to Lys-62, Arg-121 to Thr-149, Gly-163 |
| | to Leu-171, Ala-186 to Glu-195, Glu-216 to Ser-221, |
| | Ile-229 to Ser-236, Lys-258 to Lys-264, Lys-305 to |
| | Arg-313. |
| 829001 | Preferred epitopes include those comprising a sequence |
| | shown in SEQ ID NO. 1064 as residues: Thr-11 to |
| | Cys-24, Arg-48 to His-55, Arg-62 to Gly-70. |
| 829003 | Preferred epitopes include those comprising a sequence |
| | shown in SEQ ID NO. 1065 as residues: Lys-14 to |
| | Gly-22, Ser-61 to Asp-66, Cys-80 to Lys-91, Lys-97 to |
| | Arg-107, Gly-135 to Asn-146, Lys-198 to Lys-208, |
| | Met-221 to Thr-227, Phe-244 to Gly-256, Asp-292 to |
| | Gln-300. |
| 829016 | Preferred epitopes include those comprising a sequence |
| | shown in SEQ ID NO. 1066 as residues: Arg-1 to Asp-11, |
| | Ala-17 to Gln-25, Glu-30 to His-37, Cys-39 to Thr-44, |
| | Asn-86 to Phe-93. |
| 829027 | Preferred epitopes include those comprising a sequence |
| | shown in SEQ ID NO. 1067 as residues: Pro-1 to Ser-7, |
| | Thr-45 to Leu-63, Arg-113 to Thr-118, Pro-172 to |
| | Gly-182. |
| 829028 | Preferred epitopes include those comprising a sequence |
| | shown in SEQ ID NO. 1068 as residues: Ser-1 to Gln-19, |
| | Gly-32 to Phe-39, Ala-95 to Arg-116, Lys-122 to |
| | Glu-142, Ile-148 to Asn-156, Ser-168 to Asn-191, |
| | Ala-196 to Thr-204, Ser-289 to Lys-304, Leu-308 to |
| | Ser-314, Thr-332 to Ile-341. |
| 829034 | Preferred epitopes include those comprising a sequence |
| | shown in SEQ ID NO. 1070 as residues: Ser-32 to |
| | Ala-43, Thr-62 to Glu-69, Phe-128 to Thr-156, Thr-179 |
| | to His-188, Gly-196 to Glu-203, Pro-205 to Ala-219, |
| | Gln-221 to Ile-230, Pro-246 to Thr-255, Thr-271 to |
| | His-276, Asn-324 to Thr-344, Pro-364 to Ala-370, |
| | Tyr-427 to Arg-434, Gly-440 to Pro-445 |
| 829036 | Preferred epitopes include those comprising a sequence |
| | shown in SEQ ID NO. 1071 as residues: Leu-16 to |
| | Phe-21, Thr-69 to Lys-74, Asn-87 to His-92, Thr-126 to |
| | Leu-137, Phe-154 to Lys-164, Ala-171 to Asp-178, |
| | Ile-192 to Thr-203, Glu-261 to Ser-273. |
| 829049 | Preferred epitopes include those comprising a sequence |
| | shown in SEQ ID NO. 1072 as residues: |
| | Gly-50 to Tyr-59. |
| 829073 | Preferred epitopes include those comprising a sequence |
| | shown in SEQ ID NO. 1073 as residues: Asn-1 to Met-6, |
| | Asn-26 to Ser-35, Pro-43 to Ile-54. |
| 829075 | Preferred epitopes include those comprising a sequence |
| | shown in SEQ ID NO. 1074 as residues: Gly-14 to |
| | Pro-30, Ser-64 to Ser-69, Asn-97 to Arg-109. |
| 829076 | Preferred epitopes include those comprising a sequence |
| | shown in SEQ ID NO. 1075 as residues: Lys-84 to |
| | Gly-94, Asn-142 to Ile-147. |
| 829080 | Preferred epitopes include those comprising a sequence |
| | shown in SEQ ID NO. 1076 as residues: Gly-13 to |
| | Trp-23, Pro-39 to Gly-44. |
| 829087 | Preferred epitopes include those comprising a sequence |
| | shown in SEQ ID NO. 1077 as residues: |
| | Pro-13 to Arg-24. |
| 829095 | Preferred epitopes include those comprising a sequence |
| | shown in SEQ ID NO. 1079 as residues: Pro-8 to Pro-13. |
| 829118 | Preferred epitopes include those comprising a sequence |
| | shown in SEQ ID NO. 1081 as residues: Arg-7 to |
| | Val-12, Ile-52 to Thr-70, Ser-86 to Asp-91, Thr-126 |
| | to Ser-138. |
| 829152 | Preferred epitopes include those comprising a sequence |
| | shown in SEQ ID NO. 1082 as residues: |
| | Asp-12 to Ser-19. |
| 829160 | Preferred epitopes include those comprising a sequence |
| | shown in SEQ ID NO. 1083 as residues: |
| | Ala-7 to Arg-20. |
| 829163 | Preferred epitopes include those comprising a sequence |
| | shown in SEQ ID NO. 1084 as residues: Ser-23 to |
| | Asp-32, Val-36 to Glu-59, Ser-65 to Asn-76, Cys-91 to |
| | Ser-102, Pro-108 to Leu-115, Thr-151 to Gln-164, |
| | Glu-167 to Lys-176. |
| 829176 | Preferred epitopes include those comprising a sequence |
| | shown in SEQ ID NO. 1085 as residues: His-1 to Asn-8, |
| | Cys-22 to Arg-27, Gly-34 to Ser-44, Tyr-60 to Ser-65, |
| | Ser-118 to Gln-123, Ser-149 to Trp-154, Pro-159 to |
| | Gly-168, Gln-207 to Leu-220. |
| 829204 | Preferred epitopes include those comprising a sequence |
| | shown in SEQ ID NO. 1086 as residues: Ala-11 to |
| | Ser-19, Thr-104 to Lys-133. |
| 829207 | Preferred epitopes include those comprising a sequence |
| | shown in SEQ ID NO. 1087 as residues: Lys-5 to Ser-11, |
| | Pro-31 to Ser-37, Pro-87 to Asp-92, Asp-115 to Lys-123, |
| | Ser-149 to Arg-155, Thr-243 to Pro-253. |
| 829228 | Preferred epitopes include those comprising a sequence |
| | shown in SEQ ID NO. 1088 as residues: Pro-1 to Trp-6, |
| | Leu-73 to Tyr-79, Glu-108 to Thr-117, Asp-136 to |
| | Asp-142, Ser-201 to Pro-207, Leu-224 to Pro-233, |
| | Val-242 to Ala-248, Ser-312 to Leu-319, Val-349 to |
| | Ser-359, Ala-362 to His-368, Thr-370 to Gly-376, |
| | Lys-403 to Tyr-409, Glu-426 to Arg-431, Lys-455 to |
| | Asp-460, Arg-499 to Thr-505, Asp-561 to Ser-570, |
| | Ser-665 to Ser-673. |
| 829252 | Preferred epitopes include those comprising a sequence |
| | shown in SEQ ID NO. 1089 as residues: Thr-9 to Val-16. |
| 829269 | Preferred epitopes include those comprising a sequence |
| | shown in SEQ ID NO. 1091 as residues: Ser-1 to Glu-7, |
| | Lys-76 to Gln-83. |
| 829277 | Preferred epitopes include those comprising a sequence |
| | shown in SEQ ID NO. 1092 as residues: Lys-88 to |
| | Phe-97, Thr-106 to Leu-120, Thr-147 to Pro-152, |
| | Pro-173 to Met-179. |
| 829290 | Preferred epitopes include those comprising a sequence |
| | shown in SEQ ID NO. 1093 as residues: Pro-1 to Pro-19, |
| | Pro-25 to Lys-30. |
| 829308 | Preferred epitopes include those comprising a sequence |
| | shown in SEQ ID NO. 1096 as residues: Met-26 to |
| | Asn-37, Glu-42 to Gln-51, Thr-68 to Ser-95, Ala-97 to |
| | Lys-113, Asp-156 to Val-161, Val-208 to Asp-215, |
| | Pro-217 to Ala-228. |
| 829349 | Preferred epitopes include those comprising a sequence |
| | shown in SEQ ID NO. 1097 as residues: Asn-18 to |
| | Lys-24, Asp-87 to Asn-94, Glu-116 to Gly-125. |
| 829354 | Preferred epitopes include those comprising a sequence |
| | shown in SEQ ID NO. 1098 as residues: Ala-1 to |
| | Asn-16, Pro-36 to Arg-43. |
| 829388 | Preferred epitopes include those comprising a sequence |
| | shown in SEQ ID NO. 1099 as residues: Glu-91 to |
| | Pro-100, Tyr-122 to Thr-127, Thr-168 to Val-173, |
| | Thr-210 to Asp-215, Leu-219 to Gly-224, Gly-232 to |
| | Val-237. |
| 829626 | Preferred epitopes include those comprising a sequence |
| | shown in SEQ ID NO. 1101 as residues: |
| | Gly-145 to Ala-151. |
| 829730 | Preferred epitopes include those comprising a sequence |
| | shown in SEQ ID NO. 1102 as residues: Pro-22 to |
| | His-27, Pro-87 to Asp-93, Arg-109 to Lys-115, Arg-172 |
| | to Glu-177, Glu-219 to Asp-226. |
| 829892 | Preferred epitopes include those comprising a sequence shown |
| | in SEQ ID NO. 1103 as residues: Tyr-36 to |
| | Ala-46, Val-58 to Asn-63, Glu-73 to Asn-78, Asn-90 to |
| | Asn-95, Ser-125 to Leu-133, Glu-143 to Pro-150, |
| | Phe-186 to Leu-191, Leu-274 to Glu-281, Lys-303 to |
| | Phe-308, Thr-323 to Gly-330. |
| 829938 | Preferred epitopes include those comprising a sequence |
| | shown in SEQ ID NO. 1105 as residues: Thr-1 to |
| | Pro-14, Ser-36 to Thr-57, Ser-81 to Thr-91, Glu-103 to |
| | Leu-110, Glu-124 to Tyr-130, Ala-135 to Lys-140, |
| | Leu-146 to Glu-162, Lys-167 to Glu-172, Glu-199 to |
| | Val-213. |
| 829969 | Preferred epitopes include those comprising a sequence |
| | shown in SEQ ID NO. 1106 as residues: Arg-12 to |
| | His-21, Arg-77 to Ser-88. |
| 829982 | Preferred epitopes include those comprising a sequence |
| | shown in SEQ ID NO. 1107 as residues: Arg-6 to His-14, |
| | Ser-40 to Met-47, Thr-68 to Cys-74, Ile-97 to His-115, |
| | Gly-118 to Pro-124. |
| 830007 | Preferred epitopes include those comprising a sequence |
| | shown in SEQ ID NO. 1108 as residues: Ala-7 to Ala-16. |
| 830019 | Preferred epitopes include those comprising a sequence |
| | shown in SEQ ID NO. 1109 as residues: |
| | Leu-21 to Pro-27. |
| 830073 | Preferred epitopes include those comprising a sequence |
| | shown in SEQ ID NO. 1110 as residues: Gly-16 to |
| | Val-22, Pro-45 to Lys-50, Phe-58 to Arg-65, Ser-135 to |
| | Gly-141, Gly-153 to Ser-158, Pro-160 to Tyr-168. |
| 830148 | Preferred epitopes include those comprising a sequence |
| | shown in SEQ ID NO. 1114 as residues: Asp-63 to |
| | Lys-81, Gly-101 to Gly-108, Pro-182 to Ala-200, |
| | Pro-210 to Met-216, Pro-235 to Gly-243. |
| 830183 | Preferred epitopes include those comprising a sequence |
| | shown in SEQ ID NO. 1117 as residues: Pro-29 to |
| | Lys-37, Pro-40 to Val-47, Tyr-62 to His-67. |
| 830194 | Preferred epitopes include those comprising a sequence |
| | shown in SEQ ID NO. 1118 as residues: Ala-43 to |
| | Lys-51, Glu-66 to Leu-74, His-81 to Glu-88, Arg-98 to |
| | Ser-105, Gly-111 to Gln-116, Leu-166 to Lys-182, |
| | Leu-261 to Ala-273, Glu-294 to Arg-302, Glu-335 |
| | to Asp-347. |
| 830207 | Preferred epitopes include those comprising a sequence |
| | shown in SEQ ID NO. 1119 as residues: Pro-14 to |
| | Pro-48, Asp-55 to Gly-61, Lys-94 to Asn-99, Ala-107 to |
| | Ser-115, Ile-117 to Asn-124, Thr-133 to Cys-139, |
| | Thr-142 to Ile-147, Gly-163 to Ser-169. |
| 830242 | Preferred epitopes include those comprising a sequence |
| | shown in SEQ ID NO. 1120 as residues: Glu-29 to |
| | Lys-34, Leu-151 to Gln-157, Arg-160 to Ser-171, |
| | Gln-177 to Pro-190. |
| 830328 | Preferred epitopes include those comprising a sequence |
| | shown in SEQ ID NO. 1121 as residues: Pro-18 to |
| | Met-24, Glu-66 to Gln-78, Ala-85 to Arg-93, Glu-99 to |
| | His-108, Leu-114 to Asp-137, Pro-171 to Gln-176, |
| | Gly-205 to Leu-213. |
| 830340 | Preferred epitopes include those comprising a sequence |
| | shown in SEQ ID NO. 1122 as residues: Gly-12 to |
| | Lys-18, Arg-46 to Glu-56, Leu-67 to Gly-73, Ala-91 to |
| | Tyr-112. |
| 830341 | Preferred epitopes include those comprising a sequence |
| | shown in SEQ ID NO. 1123 as residues: Leu-14 to |
| | Gln-20, Asn-34 to Glu-41, Lys-193 to Asn-198. |
| 830351 | Preferred epitopes include those comprising a sequence |
| | shown in SEQ ID NO. 1124 as residues: Pro-1 to Leu-13, |
| | Gly-42 to Pro-51, Arg-64 to Ala-69, Met-104 to |
| | Asp-109, Cys-125 to Trp-132, Asp-161 to Trp-175, |
| | Glu-206 to Glu-218. |
| 830358 | Preferred epitopes include those comprising a sequence |
| | shown in SEQ ID NO. 1125 as residues: |
| | Cys-75 to Thr-81. |
| 830400 | Preferred epitopes include those comprising a sequence |
| | shown in SEQ ID NO. 1127 as residues: Pro-1 to Gly-6, |
| | Arg-17 to Arg-33, Glu-151 to Trp-157, Ile-187 to |
| | Tyr-193, Lys-249 to Glu-258, Asn-289 to Ser-294, |
| | Pro-340 to Lys-353. |
| 830437 | Preferred epitopes include those comprising a sequence |
| | shown in SEQ ID NO. 1128 as residues: Ala-87 to |
| | Ser-94, Asp-104 to Arg-112, Leu-114 to Asp-119, |
| | Ser-186 to Thr-202. |
| 830466 | Preferred epitopes include those comprising a sequence |
| | shown in SEQ ID NO. 1130 as residues: Pro-14 to |
| | Ile-24, Thr-35 to Phe-42, Ser-45 to Asn-57, Pro-65 |
| | to Trp-89. |
| 830497 | Preferred epitopes include those comprising a sequence |
| | shown in SEQ ID NO. 1131 as residues: Thr-1 to Leu-9, |
| | Ser-46 to Leu-56, Glu-117 to Lys-124, Pro-129 to |
| | Asp-135, Ala-144 to Gln-150, Gly-156 to Lys-162, |
| | Phe-182 to Pro-187, Pro-196 to Gln-201, Lys-217 to |
| | Asp-227. |
| 830511 | Preferred epitopes include those comprising a sequence |
| | shown in SEQ ID NO. 1132 as residues: Lys-13 to |
| | Cys-44, Lys-101 to Arg-109, Gln-120 to Gly-129. |
| 830540 | Preferred epitopes include those comprising a sequence |
| | shown in SEQ ID NO. 1135 as residues: Leu-31 to |
| | Lys-37, Arg-48 to Asn-54. |
| 830550 | Preferred epitopes include those comprising a sequence |
| | shown in SEQ ID NO. 1136 as residues: Pro-8 to |
| | Cys-15, Val-80 to Cys-85. |
| 830567 | Preferred epitopes include those comprising a sequence |
| | shown in SEQ ID NO. 1137 as residues: Lys-28 to |
| | Leu-33, Pro-60 to Ser-66. |
| 830586 | Preferred epitopes include those comprising a sequence |
| | shown in SEQ ID NO. 1138 as residues: Pro-1 to Gln-15, |
| | Arg-33 to Leu-40, Arg-72 to Ser-78, Leu-98 to Asp-103, |
| | Phe-116 to Gly-124, Pro-152 to Arg-158, Thr-193 to |
| | Pro-200, Leu-213 to Phe-219, Asp-229 to Lys-237, |
| | Lys-246 to Lys-258, Arg-275 to Thr-280, Thr-306 to |
| | Lys-312, Leu-320 to Arg-328, Ala-335 to Asn-340, |
| | Gly-342 to Trp-349, Cys-364 to Pro-372. |
| 830632 | Preferred epitopes include those comprising a sequence |
| | shown in SEQ ID NO. 1139 as residues: Ala-6 to Thr-14, |
| | Arg-143 to Lys-148. |
| 830659 | Preferred epitopes include those comprising a sequence |
| | shown in SEQ ID NO. 1142 as residues: Thr-32 to |
| | Tyr-40, Ala-67 to Gln-82, Arg-128 to Thr-133, |
| | Leu-137 to Thr-146, Pro-187 to Ser-193. |
| 830696 | Preferred epitopes include those comprising a sequence |
| | shown in SEQ ID NO. 1143 as residues: |
| | Glu-83 to Lys-91. |
| 830743 | Preferred epitopes include those comprising a sequence |
| | shown in SEQ ID NO. 1145 as residues: Pro-11 to |
| | Phe-16, Thr-48 to Ser-60. |
| 830770 | Preferred epitopes include those comprising a sequence |
| | shown in SEQ ID NO. 1146 as residues: |
| | Thr-36 to Thr-44. |
| 830830 | Preferred epitopes include those comprising a sequence |
| | shown in SEQ ID NO. 1147 as residues: Lys-73 to |
| | Thr-78, Pro-84 to Pro-96, Lys-107 to Glu-124, Ile-142 |
| | to Cys-153, Asp-179 to Asn-184. |
| 830838 | Preferred epitopes include those comprising a sequence |
| | shown in SEQ ID NO. 1148 as residues: Ser-17 to |
| | Arg-22, Gly-48 to Val-56, Asn-217 to Asp-223, Thr-238 |
| | to Asn-243. |
| 830851 | Preferred epitopes include those comprising a sequence |
| | shown in SEQ ID NO. 1149 as residues: Arg-1 to Val-7, |
| | Ala-156 to Phe-162, Arg-216 to Lys-239. |
| 830856 | Preferred epitopes include those comprising a sequence |
| | shown in SEQ ID NO. 1151 as residues: Trp-29 to |
| | Gly-35, Thr-41 to His-47, Val-95 to Lys-111. |
| 830862 | Preferred epitopes include those comprising a sequence |
| | shown in SEQ ID NO. 1152 as residues: Arg-14 to |
| | Val-22, Ala-24 to Gly-35, Arg-37 to Lys-58, Ala-88 to |
| | Ala-94, Lys-164 to Ser-172. |
| 830879 | Preferred epitopes include those comprising a sequence |
| | shown in SEQ ID NO. 1153 as residues: Cys-34 to |
| | Leu-44, Ser-60 to Gly-69, Asp-118 to Gly-123, |
| | Cys-148 to Gln-154. |
| 830919 | Preferred epitopes include those comprising a sequence |
| | shown in SEQ ID NO. 1154 as residues: Pro-1 to |
| | Ser-41, Arg-53 to Pro-61, Arg-66 to Gln-132. |
| 830969 | Preferred epitopes include those comprising a sequence |
| | shown in SEQ ID NO. 1155 as residues: His-17 to |
| | Pro-27, Phe-31 to Val-38, Gly-53 to Thr-62. |
| 830991 | Preferred epitopes include those comprising a sequence |
| | shown in SEQ ID NO. 1156 as residues: Arg-1 to |
| | Pro-14, Ala-44 to Ser-56, His-69 to Lys-75, Gly-89 to |
| | Lys-98, Tyr-101 to Tyr-121, Pro-123 to Thr-131, |
| | Pro-149 to Gly-171, Tyr-186 to Glu-192. |
| 831002 | Preferred epitopes include those comprising a sequence |
| | shown in SEQ ID NO. 1157 as residues: Glu-63 to |
| | Asn-73, Pro-114 to Tyr-122, Ser-194 to Glu-201, |
| | Ile-263 to Ser-269. |
| 831003 | Preferred epitopes include those comprising a sequence |
| | shown in SEQ ID NO. 1158 as residues: Ile-9 to |
| | Leu-17, Asp-63 to Gly-70, Leu-112 to Ala-128. |
| 831021 | Preferred epitopes include those comprising a sequence |
| | shown in SEQ ID NO. 1159 as residues: |
| | Asn-6 to Asp-12. |
| 831036 | Preferred epitopes include those comprising a sequence |
| | shown in SEQ ID NO. 1160 as residues: Ser-6 to |
| | Ser-25, Tyr-37 to Lys-42, Arg-49 to Tyr-54, Pro-56 to |
| | Glu-61, Gln-72 to Cys-77, Lys-104 to Glu-110, Lys-134 |
| | to Met-142, Asp-147 to Arg-158, Arg-189 to Asn-194. |
| 831071 | Preferred epitopes include those comprising a sequence |
| | shown in SEQ ID NO. 1161 as residues: Thr-41 to |
| | Arg-49, Glu-137 to Asp-142, Tyr-158 to Glu-163, |
| | Arg-184 to Thr-199, Arg-239 to Gly-253, Pro-297 to |
| | Gly-304, Pro-319 to Ile-327, Leu-347 to Val-356, |
| | Asn-435 to Leu-441, Asp-443 to Ser-452, Ala-457 to |
| | Thr-462, Asp-479 to Arg-484, Gly-510 to His-516, |
| | Glu-555 to Thr-565, Asp-597 to Ser-602, Thr-615 to |
| | Asp-622, Val-653 to Leu-661, Ala-684 to Arg-697, |
| | Ser-704 to Glu-712, Ala-731 to Ala-737, Lys-800 to |
| | Met-805. |
| 831099 | Preferred epitopes include those comprising a sequence |
| | shown in SEQ ID NO. 1163 as residues: Leu-12 to |
| | Gly-18, Leu-93 to Ile-98, Lys-165 to Ser-183, Thr-198 |
| | to Lys-211, Glu-232 to Gly-237, Pro-239 to Gly-249, |
| | Arg-257 to Asp-278, Cys-292 to Glu-297, Arg-306 to |
| | Ser-316, Asp-323 to Asn-331, Glu-347 to Gly-354, |
| | Thr-365 to Asn-370, Pro-390 to Thr-396, Asn-420 to |
| | Ser-433, Val-440 to Gln-451, His-457 to Asp-465, |
| | Phe-533 to Met-538, Ala-540 to Tyr-550, Pro-560 to |
| | Lys-565. |
| 831113 | Preferred epitopes include those comprising a sequence |
| | shown in SEQ ID NO. 1164 as residues: Ser-26 to |
| | Arg-33, Pro-51 to Thr-56, Cys-82 to Asp-94, Pro-104 |
| | to Gly-128. |
| 831120 | Preferred epitopes include those comprising a sequence |
| | shown in SEQ ID NO. 1165 as residues: Ala-39 to |
| | Leu-47, Val-49 to Lys-55, Thr-66 to Asp-75, Thr-85 to |
| | Gly-104, Ala-114 to Gly-147, Pro-176 to Thr-199, |
| | Ser-205 to Ser-221, Glu-233 to Lys-240, Lys-246 to |
| | Asp-251, Glu-256 to Ser-267, Ser-291 to Leu-302, |
| | Thr-305 to Asp-324, Cys-336 to Val-345, |
| | Phe-367 to Cys-375. |
| 831172 | Preferred epitopes include those comprising a sequence |
| | shown in SEQ ID NO. 1166 as residues: Pro-1 to Gly-7, |
| | His-119 to Gly-125, His-145 to Asp-151, Leu-173 to |
| | Leu-178. |
| 831178 | Preferred epitopes include those comprising a sequence |
| | shown in SEQ ID NO. 1167 as residues: Glu-37 to |
| | Asn-42, Ser-48 to Thr-54, Pro-101 to Glu-106. |
| 831184 | Preferred epitopes include those comprising a sequence |
| | shown in SEQ ID NO. 1168 as residues: |
| | Gln-1 to Pro-29. |
| 831203 | Preferred epitopes include those comprising a sequence |
| | shown in SEQ ID NO. 1169 as residues: Thr-1 to Ser-6, |
| | Leu-10 to Asn-23, Gln-31 to Arg-36, Arg-43 to His-49, |
| | Ala-58 to Leu-63, Gln-81 to Asp-105, Glu-113 to |
| | Ile-122, Pro-132 to Lys-137, Ser-175 to Gln-181. |
| 831257 | Preferred epitopes include those comprising a sequence |
| | shown in SEQ ID NO. 1173 as residues: Arg-87 to |
| | Leu-96, His-104 to Lys-112, Asp-144 to Pro-150. |
| 831277 | Preferred epitopes include those comprising a sequence |
| | shown in SEQ ID NO. 1174 as residues: |
| | Arg-1 to Gly-13. |
| 831317 | Preferred epitopes include those comprising a sequence |
| | shown in SEQ ID NO. 1175 as residues: Ser-97 to |
| | Lys-102, Thr-108 to Gly-119, Lys-151 to Gly-157, |
| | Pro-204 to Glu-210, Gln-224 to Gly-230, Val-238 to |
| | Cys-245, Met-279 to Asn-284, Gly-332 to Glu-349. |
| 831339 | Preferred epitopes include those comprising a sequence |
| | shown in SEQ ID NO. 1176 as residues: Met-1 to |
| | His-19, Pro-21 to Pro-27, Ala-49 to Gly-59, |
| | Pro-82 to Ala-104. |
| 831363 | Preferred epitopes include those comprising a sequence |
| | shown in SEQ ID NO. 1177 as residues: Thr-1 to |
| | Ser-14, Thr-82 to Pro-89, Met-102 to Ala-109, Phe-117 |
| | to Ile-124, Asp-142 to Arg-148, Thr-196 to Trp-205, |
| | Gln-304 to Leu-310, Gln-325 to Ser-331, Gly-387 to |
| | Thr-393, Ala-415 to Lys-430, Pro-469 to Pro-477, |
| | Gly-500 to Ile-506, Arg-521 to Gly-529, Pro-534 to |
| | Gly-541, Gln-553 to Lys-558, Ala-571 to Glu-579. |
| 831385 | Preferred epitopes include those comprising a sequence |
| | shown in SEQ ID NO. 1180 as residues: Ser-1 to Thr-9, |
| | Ala-32 to Asn-37, Thr-40 to Tyr-49, Gln-71 to Thr-80. |
| 831390 | Preferred epitopes include those comprising a sequence |
| | shown in SEQ ID NO. 1181 as residues: Trp-50 to |
| | Gly-55, Leu-109 to Val-119, Phe-146 to Asp-158, |
| | Ser-165 to Trp-172, Phe-192 to Ile-197, Leu-241 to |
| | Asp-252, Lys-268 to Pro-273, Ser-310 to Lys-315, |
| | Asp-334 to Ala-342, Pro-348 to Tyr-353. |
| 831391 | Preferred epitopes include those comprising a sequence |
| | shown in SEQ ID NO. 1182 as residues: Ser-28 to |
| | Pro-38, Pro-45 to Cys-55, Leu-70 to Ser-77, Glu-98 to |
| | Phe-104, Asp-112 to Ser-122, Thr-152 to Lys-158. |
| 831405 | Preferred epitopes include those comprising a sequence |
| | shown in SEQ ID NO. 1183 as residues: Asp-47 to |
| | Ser-55, Glu-86 to Cys-95, Glu-105 to Gly-113, Gln-133 |
| | to Asn-138, Arg-144 to Asp-156. |
| 831476 | Preferred epitopes include those comprising a sequence |
| | shown in SEQ ID NO. 1185 as residues: Gln-28 to |
| | Gly-33, Asp-41 to Trp-47, Asn-51 to Ser-56, Ser-73 to |
| | Asn-83, Trp-111 to Asn-117, Leu-133 to Gln-138, |
| | Arg-143 to Tyr-150, Thr-156 to Glu-165. |
| 831488 | Preferred epitopes include those comprising a sequence |
| | shown in SEQ ID NO. 1186 as residues: Glu-53 to |
| | Asn-59, Lys-97 to Phe-104, Lys-133 to Ala-138. |
| 831519 | Preferred epitopes include those comprising a sequence |
| | shown in SEQ ID NO. 1188 as residues: Ser-17 to |
| | Gly-25, Thr-47 to Leu-59, His-71 to Arg-77, Pro-83 to |
| | Gln-90, Tyr-133 to Ser-143, Arg-160 to Gly-169, |
| | Pro-188 to Val-193, Glu-202 to Glu-208, Leu-283 to |
| | Arg-288, Glu-295 to Leu-301, Ala-327 to Leu-333, |
| | Ala-426 to Pro-433, Leu-444 to Leu-456, Asn-492 |
| | to Ala-498. |
| 831550 | Preferred epitopes include those comprising a sequence |
| | shown in SEQ ID NO. 1190 as residues: Arg-1 to Gly-15, |
| | Ser-42 to Trp-51, Pro-59 to Arg-64. |
| 831560 | Preferred epitopes include those comprising a sequence |
| | shown in SEQ ID NO. 1191 as residues: |
| | Arg-58 to Asp-64. |
| 831570 | Preferred epitopes include those comprising a sequence |
| | shown in SEQ ID NO. 1193 as residues: Thr-61 to |
| | Cys-74, Gly-92 to Cys-104, Cys-128 to Ser-133, |
| | Asn-179 to Gly-186, Ser-198 to Cys-226, Asn-265 to |
| | Ser-274, Ser-280 to Ile-285, Ser-291 to Asp-297, |
| | Leu-305 to Gly-315, Phe-317 to Gly-333, Asp-336 to |
| | Leu-344, Phe-354 to Cys-361. |
| 831596 | Preferred epitopes include those comprising a sequence |
| | shown in SEQ ID NO. 1195 as residues: |
| | Gln-80 to Gly-85. |
| 831627 | Preferred epitopes include those comprising a sequence |
| | shown in SEQ ID NO. 1196 as residues: Arg-1 to Ser-12, |
| | Gly-94 to Thr-106, Ser-161 to Leu-169, Ser-183 to |
| | Val-188, Glu-199 to Cys-205, Ser-246 to Ile-251, |
| | Leu-271 to Thr-276. |
| 831649 | Preferred epitopes include those comprising a sequence |
| | shown in SEQ ID NO. 1197 as residues: |
| | Tyr-32 to Lys-39. |
| 831664 | Preferred epitopes include those comprising a sequence |
| | shown in SEQ ID NO. 1198 as residues: Lys-1 to |
| | Asp-42, Arg-71 to Ala-76, Gln-138 to Phe-145, Lys-170 |
| | to Thr-178, Lys-186 to Asp-192. |
| 831684 | Preferred epitopes include those comprising a sequence |
| | shown in SEQ ID NO. 1200 as residues: Ile-135 to |
| | Ala-140, Tyr-151 to Asn-157, Ser-183 to Ile-190, |
| | Gly-196 to Lys-201, Lys-226 to Lys-232, Asn-246 to |
| | Thr-252, Asp-293 to Gly-300. |
| 831687 | Preferred epitopes include those comprising a sequence |
| | shown in SEQ ID NO. 1201 as residues: |
| | Ala-56 to Tyr-63. |
| 831726 | Preferred epitopes include those comprising a sequence |
| | shown in SEQ ID NO. 1202 as residues: Arg-3 to |
| | Arg-15, Lys-34 to Thr-39, Asn-41 to Lys-59, Ala-104 |
| | to Glu-110. |
| 831762 | Preferred epitopes include those comprising a sequence |
| | shown in SEQ ID NO. 1204 as residues: Pro-83 to |
| | Leu-91, His-116 to Ala-122, Pro-141 to Ser-155. |
| 831848 | Preferred epitopes include those comprising a sequence |
| | shown in SEQ ID NO. 1206 as residues: |
| | Gln-16 to Thr-23. |
| 831861 | Preferred epitopes include those comprising a sequence |
| | shown in SEQ ID NO. 1207 as residues: Ala-20 to |
| | Lys-26, Pro-59 to Pro-67, Ser-104 to Thr-121, |
| | Gln-130 to Gln-136. |
| 831866 | Preferred epitopes include those comprising a sequence |
| | shown in SEQ ID NO. 1208 as residues: Arg-11 to |
| | Ala-24, Ile-39 to Lys-45, Arg-76 to Pro-85, Lys-124 to |
| | Lys-130, Pro-139 to Ser-153, Ala-156 to Glu-170, |
| | Ser-179 to Thr-184, Asp-234 to Gly-244, Gly-321 to |
| | Lys-329. |
| 831899 | Preferred epitopes include those comprising a sequence |
| | shown in SEQ ID NO. 1210 as residues: Asp-11 to |
| | Trp-16, Pro-37 to Thr-44, Pro-74 to Pro-82, Arg-112 to |
| | Gln-119, Cys-126 to Arg-138, Arg-199 to Thr-204. |
| 831913 | Preferred epitopes include those comprising a sequence |
| | shown in SEQ ID NO. 1211 as residues: Pro-22 to |
| | Cys-27, Glu-54 to Glu-60, Asp-112 to Phe-117, Lys-183 |
| | to Asp-189, Gln-277 to Tyr-282, Pro-325 to Arg-331, |
| | Gly-336 to Tyr-346. |
| 831985 | Preferred epitopes include those comprising a sequence |
| | shown in SEQ ID NO. 1213 as residues: Cys-7 to |
| | Asp-12, Pro-21 to Gly-26. |
| 831986 | Preferred epitopes include those comprising a sequence |
| | shown in SEQ ID NO. 1214 as residues: Cys-1 to Ser-7, |
| | Ala-62 to Gly-72, Pro-83 to Ala-101. |
| 832010 | Preferred epitopes include those comprising a sequence |
| | shown in SEQ ID NO. 1215 as residues: Leu-1 to |
| | Lys-21, Glu-39 to Cys-47, Lys-49 to Gln-61, His-64 to |
| | Gly-76, Thr-83 to Lys-90, His-92 to Ile-99. |
| 832016 | Preferred epitopes include those comprising a sequence |
| | shown in SEQ ID NO. 1216 as residues: Phe-28 to |
| | Asn-33, Leu-55 to Tyr-80, Pro-126 to Gly-132, Pro-162 |
| | to Gly-169, Pro-194 to Arg-201. |
| 832122 | Preferred epitopes include those comprising a sequence |
| | shown in SEQ ID NO. 1220 as residues: Asn-29 to |
| | Phe-36, Asp-41 to Ser-50. |
| 832197 | Preferred epitopes include those comprising a sequence |
| | shown in SEQ ID NO. 1222 as residues: |
| | Glu-61 to Leu-70. |
| 832237 | Preferred epitopes include those comprising a sequence |
| | shown in SEQ ID NO. 1223 as residues: Lys-28 to |
| | Val-35, Arg-41 to Arg-55, Pro-76 to Thr-87. |
| 832246 | Preferred epitopes include those comprising a sequence |
| | shown in SEQ ID NO. 1224 as residues: Arg-17 to |
| | Asn-23, Arg-90 to Gly-95, Leu-114 to Glu-121, Pro-153 |
| | to Asp-158. |
| 832256 | Preferred epitopes include those comprising a sequence |
| | shown in SEQ ID NO. 1225 as residues: |
| | Gly-15 to Asn-22. |
| 832280 | Preferred epitopes include those comprising a sequence |
| | shown in SEQ ID NO. 1226 as residues: Glu-1 to |
| | Trp-16, Ala-32 to Glu-38, Ala-49 to Gln-55, Pro-61 to |
| | Gln-66, Ala-78 to Asp-100, Leu-107 to Thr-127, Pro-133 |
| | to Phe-157, Pro-160 to Thr-171, Leu-179 to Asp-196, |
| | Asp-201 to Lys-222, Pro-249 to Ile-254, Val-258 to |
| | Val-263, Thr-268 to Ser-277, Thr-279 to Ala-295, |
| | Gly-299 to Phe-327, Val-335 to Asp-346, Lys-366 to |
| | Asp-378. |
| 832285 | Preferred epitopes include those comprising a sequence |
| | shown in SEQ ID NO. 1227 as residues: |
| | Phe-18 to Leu-23. |
| 832294 | Preferred epitopes include those comprising a sequence |
| | shown in SEQ ID NO. 1228 as residues: Pro-21 to |
| | Gln-28, Pro-56 to Leu-64, Glu-79 to Pro-95, Met-125 |
| | to Gly-138. |
| 832326 | Preferred epitopes include those comprising a sequence |
| | shown in SEQ ID NO. 1229 as residues: Ser-30 to |
| | Trp-45, Gln-64 to Cys-72, Pro-74 to Pro-80, Ala-92 to |
| | Arg-98, Trp-104 to Ser-112, Ser-129 to Asp-135, |
| | Pro-145 to Gln-152, Arg-168 to Gly-173, Gln-176 to |
| | Pro-183. |
| 832370 | Preferred epitopes include those comprising a sequence |
| | shown in SEQ ID NO. 1232 as residues: Ala-5 to |
| | Ala-11, Pro-23 to Pro-36, Glu-72 to Gly-82, Pro-85 to |
| | Pro-91, Asp-98 to Gly-119, Pro-121 to Glu-127. |
| 832381 | Preferred epitopes include those comprising a sequence |
| | shown in SEQ ID NO. 1233 as residues: Arg-1 to Glu-6, |
| | Arg-52 to Ala-58, Phe-72 to Leu-79, Gly-88 to Glu-93, |
| | Tyr-124 to Arg-134. |
| 832454 | Preferred epitopes include those comprising a sequence |
| | shown in SEQ ID NO. 1235 as residues: |
| | Ala-23 to Asp-41. |
| 832465 | Preferred epitopes include those comprising a sequence |
| | shown in SEQ ID NO. 1236 as residues: Ala-1 to Gly-7, |
| | Ala-32 to Val-45, Ile-65 to Ser-75, Ser-93 to Ser-108. |
| 832475 | Preferred epitopes include those comprising a sequence |
| | shown in SEQ ID NO. 1237 as residues: Arg-1 to |
| | Val-10, Thr-65 to Ser-71, Arg-83 to Tyr-96, |
| | Trp-104 to Trp-111. |
| 832495 | Preferred epitopes include those comprising a sequence |
| | shown in SEQ ID NO. 1238 as residues: |
| | Arg-9 to Arg-14. |
| 832498 | Preferred epitopes include those comprising a sequence |
| | shown in SEQ ID NO. 1239 as residues: Pro-26 to |
| | Asp-31, Thr-113 to Gly-125, Asn-158 to Glu-163, |
| | Asn-288 to Val-293. |
| 832501 | Preferred epitopes include those comprising a sequence |
| | shown in SEQ ID NO. 1240 as residues: |
| | Ser-8 to Glu-13. |
| 832505 | Preferred epitopes include those comprising a sequence |
| | shown in SEQ ID NO. 1241 as residues: Ala-27 to |
| | Arg-46, Pro-54 to Arg-76, Arg-134 to Lys-140, Asn-148 |
| | to Ser-154, Lys-166 to Thr-172, Pro-175 to Gln-182, |
| | Asp-185 to Asp-192. |
| 832554 | Preferred epitopes include those comprising a sequence |
| | shown in SEQ ID NO. 1243 as residues: Arg-26 to |
| | Val-31, Asn-122 to Thr-128. |
| 832569 | Preferred epitopes include those comprising a sequence |
| | shown in SEQ ID NO. 1244 as residues: |
| | Gln-6 to Met-16. |
| 832578 | Preferred epitopes include those comprising a sequence |
| | shown in SEQ ID NO. 1245 as residues: Arg-15 to |
| | Leu-27, Ser-62 to Gly-72, Pro-107 to His-112, Pro-122 |
| | to Gln-142, Glu-147 to Arg-158, Lys-177 to Lys-191, |
| | Leu-195 to Val-202, Leu-206 to Pro-218, Glu-228 |
| | to Gln-233, Asp-239 to Asp-244, Glu-258 to Gln-278. |
| 832615 | Preferred epitopes include those comprising a sequence |
| | shown in SEQ ID NO. 1246 as residues: |
| | Gln-41 to Ala-48. |
| 832632 | Preferred epitopes include those comprising a sequence |
| | shown in SEQ ID NO. 1248 as residues: Asn-60 to |
| | Val-70, Glu-93 to Trp-107, Arg-116 to Gln-125, Leu-133 |
| | to Lys-141, Lys-162 to Glu-167. |
| 832633 | Preferred epitopes include those comprising a sequence |
| | shown in SEQ ID NO. 1249 as residues: Gly-8 to |
| | Trp-13, Pro-36 to Gly-41, Pro-91 to Ala-96. |
| 834859 | Preferred epitopes include those comprising a sequence |
| | shown in SEQ ID NO. 1252 as residues: Tyr-16 to |
| | Leu-22, Asp-24 to Asp-34, Gly-43 to Ala-48, Gly-57 to |
| | Thr-68, Gly-118 to Ser-127, Ile-129 to Tyr-134, |
| | Pro-139 to Asp-162. |
| 834861 | Preferred epitopes include those comprising a sequence |
| | shown in SEQ ID NO. 1253 as residues: Glu-14 to |
| | Glu-50, Glu-67 to Asp-74, Leu-89 to Asn-95. |
| 834890 | Preferred epitopes include those comprising a sequence |
| | shown in SEQ ID NO. 1254 as residues: Arg-8 to |
| | Lys-13, Gly-35 to Lys-42, Ala-48 to Lys-54, Ala-105 to |
| | Leu-110, Gly-150 to Val-157, Phe-164 to Asn-173. |
| 835079 | Preferred epitopes include those comprising a sequence |
| | shown in SEQ ID NO. 1255 as residues: |
| | Ser-53 to Pro-60. |
| 835554 | Preferred epitopes include those comprising a sequence |
| | shown in SEQ ID NO. 1256 as residues: Ile-31 to |
| | Ile-38, Asp-116 to Arg-121, Phe-246 to Leu-251, |
| | Lys-280 to Tyr-291, Met-363 to Arg-373, Gly-381 |
| | to Trp-386. |
| 835723 | Preferred epitopes include those comprising a sequence |
| | shown in SEQ ID NO. 1258 as residues: Glu-20 to |
| | Thr-26, Trp-47 to Ser-57, Pro-98 to Asn-105, Pro-124 |
| | to Phe-129, Ala-173 to Val-183, Lys-190 to Ser-196, |
| | Asn-277 to Asn-284, Glu-297 to Phe-306, Thr-322 to |
| | Lys-327, Gln-372 to Val-383, Pro-387 to Gly-395, |
| | Ser-406 to Thr-415, Arg-432 to Thr-442. |
| 835791 | Preferred epitopes include those comprising a sequence |
| | shown in SEQ ID NO. 1259 as residues: Ala-4 to Gly-10. |
| 835817 | Preferred epitopes include those comprising a sequence |
| | shown in SEQ ID NO. 1260 as residues: |
| | Glu-37 to Leu-43. |
| 835840 | Preferred epitopes include those comprising a sequence |
| | shown in SEQ ID NO. 1261 as residues: Gln-1 to Asn-6, |
| | Pro-18 to Ile-31. |
| 836048 | Preferred epitopes include those comprising a sequence |
| | shown in SEQ ID NO. 1262 as residues: Lys-1 to |
| | Lys-11, Tyr-27 to Glu-35, Glu-61 to Gly-68. |
| 836898 | Preferred epitopes include those comprising a sequence |
| | shown in SEQ ID NO. 1263 as residues: Gln-94 to |
| | Lys-102, Gly-140 to Thr-154, Arg-173 to Asp-196, |
| | Thr-201 to Asp-206, Glu-241 to Gly-248. |
| 836927 | Preferred epitopes include those comprising a sequence |
| | shown in SEQ ID NO. 1264 as residues: |
| | His-1 to Arg-12. |
| 837344 | Preferred epitopes include those comprising a sequence |
| | shown in SEQ ID NO. 1265 as residues: |
| | Pro-15 to Ile-24. |
| 837789 | Preferred epitopes include those comprising a sequence |
| | shown in SEQ ID NO. 1266 as residues: Ser-1 to Trp-7, |
| | Asp-47 to Ile-52, Pro-70 to Ser-80, Cys-89 to Thr-98, |
| | Ala-131 to Ser-142, Phe-169 to Cys-176, Gly-183 to |
| | Ser-193, Phe-202 to Pro-209, Arg-243 to Ala-249, |
| | Ser-256 to Lys-265, Arg-277 to Asp-284. |
| 838754 | Preferred epitopes include those comprising a sequence |
| | shown in SEQ ID NO. 1268 as residues: Phe-27 to |
| | Ser-37, Tyr-91 to Arg-96, Pro-156 to Gln-164, Cys-207 |
| | to Val-216, Met-242 to Tyr-251. |
| 839561 | Preferred epitopes include those comprising a sequence |
| | shown in SEQ ID NO. 1271 as residues: Arg-2 to Gly-7, |
| | Arg-16 to Gln-22, Phe-41 to Gly-49, Ala-60 to Asn-74, |
| | Leu-125 to Gln-131, Asp-170 to Pro-175, Ala-209 to |
| | Arg-218, Glu-222 to Glu-258, Ala-265 to Ser-300. |
| 839816 | Preferred epitopes include those comprising a sequence |
| | shown in SEQ ID NO. 1272 as residues: His-32 to |
| | Arg-37, Ser-42 to Ser-48, Glu-77 to Glu-88. |
| 840068 | Preferred epitopes include those comprising a sequence |
| | shown in SEQ ID NO. 1273 as residues: |
| | Ala-1 to Gln-14. |
| 840279 | Preferred epitopes include those comprising a sequence |
| | shown in SEQ ID NO. 1274 as residues: |
| | Ala-1 to Asp-15. |
| 840538 | Preferred epitopes include those comprising a sequence |
| | shown in SEQ ID NO. 1276 as residues: Ala-8 to |
| | Pro-13, Pro-18 to Gln-26, Lys-107 to Pro-114, Ala-149 |
| | to Arg-157, Ile-294 to Leu-299, Ser-356 to Pro-363, |
| | Pro-384 to Phe-392, Ala-474 to Gly-481, Ala-489 to |
| | Tyr-494, Pro-512 to Lys-517, Arg-623 to Thr-630, |
| | Lys-673 to Ser-678, Thr-703 to His-709, Arg-714 |
| | to Arg-720, Gly-755 to Glu-766. |
| 840549 | Preferred epitopes include those comprising a sequence |
| | shown in SEQ ID NO. 1278 as residues: Ala-5 to |
| | Lys-15, Pro-28 to Gln-34, Tyr-105 to His-111, |
| | Gln-150 to Cys-157. |
| 840557 | Preferred epitopes include those comprising a sequence |
| | shown in SEQ ID NO. 1280 as residues: Gly-34 to |
| | Leu-40, Thr-125 to Gly-134, Ala-148 to Arg-156, |
| | Lys-196 to Lys-215. |
| 840561 | Preferred epitopes include those comprising a sequence |
| | shown in SEQ ID NO. 1281 as residues: |
| | Ser-21 to Phe-30. |
| 840562 | Preferred epitopes include those comprising a sequence |
| | shown in SEQ ID NO. 1282 as residues: Gln-33 to |
| | Arg-41, Tyr-66 to Glu-71, Thr-112 to Gly-118, Thr-141 |
| | to Gly-148, Thr-160 to Cys-168, Arg-171 to Gly-177, |
| | Thr-180 to Pro-191, Glu-217 to Asp-225, Asp-236 |
| | to Lys-243. |
| 840564 | Preferred epitopes include those comprising a sequence |
| | shown in SEQ ID NO. 1283 as residues: Val-13 to |
| | Pro-19, Gln-34 to Gly-39. |
| 840600 | Preferred epitopes include those comprising a sequence |
| | shown in SEQ ID NO. 1285 as residues: |
| | Leu-26 to Ile-39. |
| 840620 | Preferred epitopes include those comprising a sequence |
| | shown in SEQ ID NO. 1288 as residues: Ser-17 to |
| | Ser-26, His-32 to Gly-42, Thr-78 to Gln-83, Asp-130 to |
| | Leu-136, Arg-158 to Pro-164. |
| 840626 | Preferred epitopes include those comprising a sequence |
| | shown in SEQ ID NO. 1290 as residues: Phe-7 to |
| | Tyr-13, Pro-19 to Ala-35, Asp-87 to Leu-96, Lys-98 to |
| | Glu-105, Glu-120 to Leu-133. |
| 840638 | Preferred epitopes include those comprising a sequence |
| | shown in SEQ ID NO. 1291 as residues: Gly-8 to |
| | Leu-13, Gly-21 to Ser-31, Arg-45 to Arg-54. |
| 840649 | Preferred epitopes include those comprising a sequence |
| | shown in SEQ ID NO. 1292 as residues: Asn-30 to |
| | Thr-37, Asp-44 to Lys-52, Ser-71 to Asp-80, Glu-127 |
| | to Glu-133, Arg-162 to Ala-173, Glu-191 to Leu-199. |
| 840651 | Preferred epitopes include those comprising a sequence |
| | shown in SEQ ID NO. 1293 as residues: Gly-14 to |
| | Glu-38, Asn-90 to Lys-100, Lys-150 to Val-158, Ser-166 |
| | to Gly-175. |
| 840681 | Preferred epitopes include those comprising a sequence |
| | shown in SEQ ID NO. 1295 as residues: Thr-25 to |
| | Gly-31, Pro-86 to Trp-97, Ser-132 to Phe-138. |
| 840682 | Preferred epitopes include those comprising a sequence |
| | shown in SEQ ID NO. 1296 as residues: Arg-12 to |
| | Lys-19, Asn-30 to Gly-36, Asp-50 to Gly-57, Glu-64 to |
| | Thr-69, Thr-79 to Lys-91, Gln-110 to Thr-115, |
| | Arg-223 to Gln-229, Asp-255 to Asp-260, Arg-278 to |
| | Gly-287, Glu-294 to Gln-300, Glu-433 to Glu-451, |
| | Leu-474 to Glu-479, Asp-490 to Leu-498, Gln-519 to |
| | Asp-527, Tyr-566 to Asp-575. |
| 840684 | Preferred epitopes include those comprising a sequence |
| | shown in SEQ ID NO. 1297 as residues: Pro-1 to Ala-9, |
| | Val-56 to Val-63, Gly-86 to Glu-91. |
| 840697 | Preferred epitopes include those comprising a sequence |
| | shown in SEQ ID NO. 1298 as residues: Pro-9 to |
| | Arg-15, Pro-36 to Ser-42, Ser-65 to Phe-72, Gly-99 |
| | to Ser-105, Ala-122 to Phe-129. |
| 840698 | Preferred epitopes include those comprising a sequence |
| | shown in SEQ ID NO. 1299 as residues: Thr-75 to |
| | Pro-84, His-94 to Met-99, Asp-149 to Ile-168, Asn-370 |
| | to Asn-375, Ser-384 to Lys-392, His-427 to Tyr-438. |
| 840708 | Preferred epitopes include those comprising a sequence |
| | shown in SEQ ID NO. 1300 as residues: |
| | Ala-27 to Ser-36. |
| 840714 | Preferred epitopes include those comprising a sequence |
| | shown in SEQ ID NO. 1301 as residues: Gly-1 to |
| | Gly-20, Arg-54 to His-59, Asn-89 to Leu-95, Ser-119 to |
| | Lys-125, Trp-127 to Cys-133, Gln-175 to Gln-185, |
| | Asp-213 to Lys-222, Pro-267 to Gln-275, Asp-306 to |
| | Asp-313, Thr-321 to Cys-331. |
| 840716 | Preferred epitopes include those comprising a sequence |
| | shown in SEQ ID NO. 1302 as residues: Asn-40 to |
| | Thr-45, His-210 to Pro-215, Glu-369 to Thr-375, |
| | Lys-383 to Leu-397, Pro-438 to Ile-447, Pro-510 to |
| | Tyr-520, Arg-528 to Arg-533, Thr-549 to Thr-555. |
| 840721 | Preferred epitopes include those comprising a sequence |
| | shown in SEQ ID NO. 1303 as residues: Arg-1 to Arg-7, |
| | Pro-29 to Lys-56, Asp-103 to Arg-108, Tyr-122 to |
| | Ser-127, Gly-219 to Glu-227, Asp-250 to Glu-255, |
| | Glu-294 to Pro-301, Ala-321 to Tyr-327, Arg-367 to |
| | Pro-373, Glu-396 to Asn-405, Gly-411 to Arg-418, |
| | Asn-433 to Lys-441. |
| 840735 | Preferred epitopes include those comprising a sequence |
| | shown in SEQ ID NO. 1304 as residues: Glu-1 to |
| | Gly-11, Thr-20 to Asp-40, Gly-51 to Glu-61, Ala-64 to |
| | Leu-78, Leu-82 to Arg-94. |
| 840738 | Preferred epitopes include those comprising a sequence |
| | shown in SEQ ID NO. 1305 as residues: |
| | Gln-26 to Asn-34. |
| 840745 | Preferred epitopes include those comprising a sequence |
| | shown in SEQ ID NO. 1306 as residues: Gln-7 to |
| | Gly-12, Leu-60 to Pro-65, Arg-85 to Lys-99, Ser-132 to |
| | Pro-145, Pro-150 to Asp-155, Pro-183 to Asn-193, |
| | Arg-200 to Tyr-206. |
| 840747 | Preferred epitopes include those comprising a sequence |
| | shown in SEQ ID NO. 1307 as residues: Gln-1 to |
| | Asp-15, Ile-35 to Glu-41, Leu-66 to Asn-71, Leu-73 to |
| | Pro-79, Gln-87 to Lys-94, Val-117 to Arg-123, |
| | Pro-144 to Tyr-150. |
| 840756 | Preferred epitopes include those comprising a sequence |
| | shown in SEQ ID NO. 1308 as residues: Arg-8 to |
| | Gln-19, Arg-25 to Lys-38. |
| 840776 | Preferred epitopes include those comprising a sequence |
| | shown in SEQ ID NO. 1309 as residues: Val-2 to Pro-10, |
| | Ser-28 to Ala-33, Pro-39 to Tyr-44, Thr-46 to Trp-55, |
| | Ser-64 to Ser-72, Ala-103 to Pro-109, Pro-111 to |
| | Gln-118. |
| 840784 | Preferred epitopes include those comprising a sequence |
| | shown in SEQ ID NO. 1310 as residues: Pro-9 to |
| | Gly-20, Asn-32 to Leu-42, Asn-60 to Lys-70, Pro-76 to |
| | Gln-81, Glu-86 to Val-93, Arg-106 to Arg-111, |
| | Lys-176 to Asn-183. |
| 840788 | Preferred epitopes include those comprising a sequence |
| | shown in SEQ ID NO. 1311 as residues: Ser-1 to Gln-8, |
| | Val-40 to Ser-49, Arg-105 to Lys-110. |
| 840794 | Preferred epitopes include those comprising a sequence |
| | shown in SEQ ID NO. 1312 as residues: Arg-1 to |
| | Gln-14, Arg-43 to Glu-54. |
| 840797 | Preferred epitopes include those comprising a sequence |
| | shown in SEQ ID NO. 1313 as residues: Gly-1 to Arg-9, |
| | Asn-31 to Asp-37, Arg-44 to Asn-53, Gly-62 to Lys-77, |
| | Thr-123 to Ile-137, Gly-389 to Thr-394, Lys-486 to |
| | Asn-493, Glu-512 to Phe-520, Met-555 to Lys-560, |
| | Leu-618 to Ser-623, Ile-698 to Glu-706, Gly-723 to |
| | Leu-730, Ala-773 to Gln-790. |
| 840818 | Preferred epitopes include those comprising a sequence |
| | shown in SEQ ID NO. 1315 as residues: Pro-1 to |
| | Ile-12, Asp-30 to Tyr-35, Leu-38 to Pro-45, Lys-54 to |
| | Thr-60, Thr-75 to Leu-80, Asp-92 to Tyr-100, Ile-133 |
| | to Thr-138, Thr-194 to Glu-199, Asp-233 to Leu-239, |
| | Met-243 to Ala-251, Asp-254 to Glu-261. |
| 840822 | Preferred epitopes include those comprising a sequence |
| | shown in SEQ ID NO. 1316 as residues: Val-100 to |
| | Tyr-106, Ala-127 to His-135, Gln-153 to Lys-158, |
| | Gly-214 to Glu-219, Gln-236 to His-244, Lys-253 to |
| | Tyr-258. |
| 840846 | Preferred epitopes include those comprising a sequence |
| | shown in SEQ ID NO. 1318 as residues: Ala-20 to |
| | Thr-27, Glu-47 to Tyr-57, Tyr-87 to Lys-95, Pro-121 to |
| | Ala-127, Pro-208 to Ala-224. |
| 840848 | Preferred epitopes include those comprising a sequence |
| | shown in SEQ ID NO. 1319 as residues: Arg-77 to |
| | Asn-82, Glu-119 to Arg-124, Gln-156 to Thr-162, |
| | Lys-209 to Lys-215. |
| 840860 | Preferred epitopes include those comprising a sequence |
| | shown in SEQ ID NO. 1320 as residues: Ile-27 to |
| | Asp-41, Glu-43 to Ala-58, Glu-149 to Glu-154, Lys-158 |
| | to Ile-165, Glu-167 to Gly-189, Glu-242 to Phe-247, |
| | Arg-259 to Phe-268, Ile-283 to Val-291, Thr-295 to |
| | Thr-307, Glu-328 to Asp-338, Asp-372 to Gly-387. |
| 840871 | Preferred epitopes include those comprising a sequence |
| | shown in SEQ ID NO. 1322 as residues: Gly-31 to |
| | Tyr-38, Leu-40 to Leu-45, Pro-203 to Trp-208. |
| 840874 | Preferred epitopes include those comprising a sequence |
| | shown in SEQ ID NO. 1323 as residues: |
| | Ala-23 to Gly-28. |
| 840878 | Preferred epitopes include those comprising a sequence |
| | shown in SEQ ID NO. 1324 as residues: Thr-40 to |
| | Glu-46, Pro-69 to Arg-76, Glu-108 to Asp-150. |
| 840880 | Preferred epitopes include those comprising a sequence |
| | shown in SEQ ID NO. 1325 as residues: Ser-5 to |
| | Lys-14, Phe-32 to Gln-37. |
| 840884 | Preferred epitopes include those comprising a sequence |
| | shown in SEQ ID NO. 1326 as residues: Leu-4 to Ser-10. |
| 840926 | Preferred epitopes include those comprising a sequence |
| | shown in SEQ ID NO. 1328 as residues: Met-6 to |
| | Thr-15, Ser-17 to Phe-37, Ser-148 to Lys-154, Lys-260 |
| | to Phe-276, Glu-285 to Ile-292, Lys-410 to Asp-424. |
| 840932 | Preferred epitopes include those comprising a sequence |
| | shown in SEQ ID NO. 1329 as residues: Tyr-75 to |
| | Pro-83, Ile-181 to Gln-191, Glu-267 to Leu-275, |
| | Met-301 to Ala-307, Phe-322 to Gln-328, Met-371 to |
| | Gly-381, Gln-458 to Leu-463, Glu-474 to Lys-480, |
| | Lys-551 to Ser-558. |
| 840940 | Preferred epitopes include those comprising a sequence |
| | shown in SEQ ID NO. 1330 as residues: Ser-26 to |
| | Thr-34, Thr-80 to Lys-88. |
| 840947 | Preferred epitopes include those comprising a sequence |
| | shown in SEQ ID NO. 1331 as residues: Ile-1 to |
| | Arg-11, Pro-19 to Gln-46, Ala-55 to Pro-62, Cys-65 to |
| | Cys-82, Lys-93 to Pro-108. |
| 840964 | Preferred epitopes include those comprising a sequence |
| | shown in SEQ ID NO. 1333 as residues: |
| | Ser-41 to Cys-46. |
| 840979 | Preferred epitopes include those comprising a sequence |
| | shown in SEQ ID NO. 1334 as residues: Tyr-10 to |
| | His-27, Tyr-31 to Arg-41, Thr-44 to Leu-61, Cys-68 to |
| | Phe-73, Lys-98 to Glu-106, Gln-132 to Val-142, Glu-184 |
| | to Leu-191. |
| 840984 | Preferred epitopes include those comprising a sequence |
| | shown in SEQ ID NO. 1335 as residues: Arg-38 to |
| | Gln-48, Met-137 to Asn-144, Gln-167 to Gln-172, |
| | Lys-182 to Gln-189, Gln-196 to Glu-206, Ile-210 to |
| | Glu-223, Gln-225 to Arg-246, Glu-250 to Thr-269, |
| | Gln-296 to Ile-318, Arg-323 to Glu-328, Tyr-337 to |
| | Lys-343, Glu-349 to Thr-357, Ser-393 to Glu-403, |
| | Arg-405 to Ile-427, Arg-431 to Glu-442, Leu-446 to |
| | Lys-473, Glu-475 to Leu-486, Ile-488 to Asp-503, |
| | Ser-505 to Arg-623, Ala-625 to Asn-631, His-634 to |
| | Trp-792, Gly-799 to Gly-870, Arg-872 to Glu-929, |
| | Ser-931 to Pro-954, Ala-957 to Ala-977, Glu-982 to |
| | Trp-1000. |
| 840986 | Preferred epitopes include those comprising a sequence |
| | shown in SEQ ID NO. 1336 as residues: |
| | Asp-41 to Tyr-51. |
| 840988 | Preferred epitopes include those comprising a sequence |
| | shown in SEQ ID NO. 1337 as residues: Pro-17 to |
| | Leu-31, Ser-95 to Val-100, Lys-123 to Gly-129. |
| 840990 | Preferred epitopes include those comprising a sequence |
| | shown in SEQ ID NO. 1338 as residues: Met-9 to |
| | Glu-16, Glu-41 to Trp-47, Arg-55 to Glu-62, Asp-135 to |
| | Ile-146, Gly-154 to Gly-160, Met-207 to Phe-214, |
| | Ser-245 to Lys-252, Gln-282 to Gln-288. |
| 841009 | Preferred epitopes include those comprising a sequence |
| | shown in SEQ ID NO. 1340 as residues: Glu-12 to |
| | Thr-27, Met-45 to Asn-52, Tyr-79 to Thr-87, Asp-97 |
| | to Gly-102, Met-112 to Asp-120, Pro-141 to Tyr-155. |
| 841012 | Preferred epitopes include those comprising a sequence |
| | shown in SEQ ID NO. 1341 as residues: Lys-36 to |
| | Ile-44, Arg-49 to Lys-69. |
| 841016 | Preferred epitopes include those comprising a sequence |
| | shown in SEQ ID NO. 1342 as residues: Cys-75 to |
| | His-82, Asp-126 to Tyr-135, Pro-144 to Tyr-155, |
| | Gly-179 to Trp-198, Tyr-201 to Met-208, Pro-226 to |
| | Lys-234, Gln-249 to Asp-267. |
| 841017 | Preferred epitopes include those comprising a sequence |
| | shown in SEQ ID NO. 1343 as residues: |
| | Gln-1 to Trp-19. |
| 841021 | Preferred epitopes include those comprising a sequence |
| | shown in SEQ ID NO. 1344 as residues: Glu-58 to |
| | Gly-63, Leu-75 to Leu-82. |
| 841032 | Preferred epitopes include those comprising a sequence |
| | shown in SEQ ID NO. 1345 as residues: Pro-1 to |
| | Gly-13, Pro-30 to Ser-57, Gln-61 to Thr-77, Arg-82 to |
| | Thr-88, Pro-100 to Lys-105, Gly-119 to Gly-126. |
| 841051 | Preferred epitopes include those comprising a sequence |
| | shown in SEQ ID NO. 1346 as residues: Asn-1 to Lys-6, |
| | Thr-16 to Glu-21, Asn-45 to Ser-58, Asp-68 to Ser-75. |
| 841064 | Preferred epitopes include those comprising a sequence |
| | shown in SEQ ID NO. 1347 as residues: Asp-53 to |
| | Pro-58, Glu-78 to Lys-85, Pro-95 to Arg-102, Ser-142 |
| | to Arg-148, Lys-209 to Arg-214, Lys-241 to Gly-246, |
| | Ser-287 to Leu-292, Lys-307 to Val-313, Arg-389 |
| | to Gln-394. |
| 841069 | Preferred epitopes include those comprising a sequence |
| | shown in SEQ ID NO. 1348 as residues: Thr-1 to |
| | Trp-14, Lys-27 to Leu-44, Glu-59 to Arg-73, Lys-87 to |
| | Phe-95, Pro-160 to Asn-166, Leu-212 to Ile-220, |
| | Arg-236 to Asp-243. |
| 841072 | Preferred epitopes include those comprising a sequence |
| | shown in SEQ ID NO. 1349 as residues: Pro-7 to |
| | Arg-12, Phe-71 to Gln-76, Arg-82 to Asp-98, Ala-108 |
| | to Glu-128. |
| 841078 | Preferred epitopes include those comprising a sequence |
| | shown in SEQ ID NO. 1350 as residues: |
| | Arg-32 to Ala-39. |
| 841080 | Preferred epitopes include those comprising a sequence |
| | shown in SEQ ID NO. 1351 as residues: Glu-1 to Gly-7, |
| | Glu-25 to Gly-33, Ala-54 to Phe-60, Gly-64 to Gln-108, |
| | Glu-116 to Ser-122, Pro-130 to Asn-138, Gln-141 to |
| | Lys-153, Arg-164 to Ser-172, Leu-186 to Met-194, |
| | Pro-197 to Tyr-205, Asp-218 to Lys-229, Thr-236 to |
| | Ser-246, Ala-259 to Trp-266, Pro-281 to Pro-287, |
| | Cys-291 to Gln-298. |
| 841092 | Preferred epitopes include those comprising a sequence |
| | shown in SEQ ID NO. 1353 as residues: |
| | Glu-45 to Lys-50. |
| 841095 | Preferred epitopes include those comprising a sequence |
| | shown in SEQ ID NO. 1354 as residues: Lys-1 to |
| | Ser-19, Gly-33 to Gly-63, Gly-77 to Pro-89, Ser-164 to |
| | Ser-180, Ser-233 to Lys-238, Lys-267 to Leu-286. |
| 841096 | Preferred epitopes include those comprising a sequence |
| | shown in SEQ ID NO. 1355 as residues: Gly-5 to |
| | Leu-12, Tyr-18 to Asp-25, Ile-88 to Ala-125, Ser-129 to |
| | Tyr-141, Gln-191 to Gln-196, Thr-290 to Asn-296, |
| | Thr-301 to Thr-309, Leu-360 to Ala-365, Leu-367 to |
| | Gly-378, Pro-398 to Gly-418, Pro-443 to Gly-454. |
| 841102 | Preferred epitopes include those comprising a sequence |
| | shown in SEQ ID NO. 1356 as residues: |
| | Ser-61 to Leu-71. |
| 841108 | Preferred epitopes include those comprising a sequence |
| | shown in SEQ ID NO. 1358 as residues: Ala-8 to |
| | Leu-20, Lys-27 to Arg-33, Arg-40 to Ala-50, Asp-77 |
| | to Glu-84, Asn-99 to Gly-109. |
| 841119 | Preferred epitopes include those comprising a sequence |
| | shown in SEQ ID NO. 1360 as residues: Lys-6 to |
| | Ala-14, Ile-68 to Asn-73, Val-84 to Leu-90, Glu-110 to |
| | Val-116, Leu-182 to Gly-190, Tyr-264 to Phe-270, |
| | Ile-300 to Lys-306, Pro-354 to Glu-367. |
| 841124 | Preferred epitopes include those comprising a sequence |
| | shown in SEQ ID NO. 1361 as residues: |
| | Ser-21 to Thr-26. |
| 841143 | Preferred epitopes include those comprising a sequence |
| | shown in SEQ ID NO. 1363 as residues: Thr-1 to Lys-9, |
| | Pro-20 to Gly-27, Gly-29 to Gly-52, Arg-54 to Gly-61, |
| | Gly-69 to Gly-75, Ser-79 to Gly-96, Val-130 to Arg-135, |
| | His-207 to Asp-212, Val-296 to Leu-310, Arg-327 to |
| | Asn-334. |
| 841148 | Preferred epitopes include those comprising a sequence |
| | shown in SEQ ID NO. 1364 as residues: Pro-1 to |
| | Met-43, Pro-55 to Ala-66, Pro-118 to Glu-128, |
| | Arg-181 to Lys-192, Tyr-197 to Thr-207, Trp-278 to |
| | Cys-284, Arg-334 to Asp-349. |
| 841155 | Preferred epitopes include those comprising a sequence |
| | shown in SEQ ID NO. 1367 as residues: Gly-9 to |
| | Arg-24, Glu-69 to Met-74, Leu-86 to Leu-92, Asp-95 |
| | to Arg-115. |
| 841163 | Preferred epitopes include those comprising a sequence |
| | shown in SEQ ID NO. 1370 as residues: Gly-29 to |
| | Gly-35, Ala-37 to Ala-48, Arg-97 to Thr-102, Arg-114 |
| | to Leu-119, Lys-144 to Lys-155. |
| 841169 | Preferred epitopes include those comprising a sequence |
| | shown in SEQ ID NO. 1371 as residues: Ala-31 to |
| | Thr-69, Pro-90 to Pro-95, Pro-117 to Trp-126, |
| | Pro-128 to Arg-136. |
| 841172 | Preferred epitopes include those comprising a sequence |
| | shown in SEQ ID NO. 1372 as residues: Gly-17 to |
| | Arg-35, His-76 to Pro-90, Pro-92 to Cys-103. |
| 841174 | Preferred epitopes include those comprising a sequence |
| | shown in SEQ ID NO. 1373 as residues: Arg-1 to Arg-8, |
| | Arg-14 to Phe-19. |
| 841179 | Preferred epitopes include those comprising a sequence |
| | shown in SEQ ID NO. 1374 as residues: Leu-4 to |
| | Met-10, Leu-17 to Tyr-36, Arg-38 to Asp-63, Tyr-82 to |
| | Glu-90, Pro-97 to Gly-134, Arg-137 to Pro-148, Thr-160 |
| | to Lys-171, Tyr-183 to Asn-228, Gln-249 to Asn-258, |
| | Arg-263 to Glu-271, Arg-277 to Gln-296, Phe-298 to |
| | Asp-320, Glu-322 to Lys-329, Thr-337 to Thr-343, |
| | Glu-356 to Arg-363, Gly-371 to Asp-384. |
| 841183 | Preferred epitopes include those comprising a sequence |
| | shown in SEQ ID NO. 1375 as residues: His-1 to |
| | Ser-27, Arg-60 to Arg-73, Arg-96 to Asp-124, Asp-131 |
| | to Gly-143, Lys-145 to Glu-150. |
| 841186 | Preferred epitopes include those comprising a sequence |
| | shown in SEQ ID NO. 1376 as residues: Leu-7 to |
| | Val-18, Ser-27 to Pro-57, Arg-124 to Thr-135, Pro-212 |
| | to Ser-230, Gly-282 to Lys-287, Lys-441 to Lys-448. |
| 841204 | Preferred epitopes include those comprising a sequence |
| | shown in SEQ ID NO. 1377 as residues: Lys-29 to |
| | Arg-35, Glu-81 to Arg-87, Ala-251 to Glu-261, Thr-266 |
| | to Gly-271, Thr-289 to Glu-295, Gly-328 to Tyr-334, |
| | Phe-432 to Lys-438, Asn-440 to Trp-458. |
| 841206 | Preferred epitopes include those comprising a sequence |
| | shown in SEQ ID NO. 1378 as residues: Val-17 to |
| | Pro-25, Thr-55 to Asp-70, Lys-75 to Leu-81. |
| 841207 | Preferred epitopes include those comprising a sequence |
| | shown in SEQ ID NO. 1379 as residues: Pro-9 to |
| | Glu-15, Arg-22 to Trp-32, Ser-54 to Glu-62, Asn-92 |
| | to Gly-103. |
| 841211 | Preferred epitopes include those comprising a sequence |
| | shown in SEQ ID NO. 1380 as residues: Arg-7 to |
| | Gly-12, Met-42 to Ser-58, Gln-65 to Asn-73, Glu-91 to |
| | Ala-99, Pro-103 to Tyr-109, Arg-174 to Ala-179, |
| | His-189 to Gln-196, Asn-208 to Pro-219. |
| 841225 | Preferred epitopes include those comprising a sequence |
| | shown in SEQ ID NO. 1381 as residues: Ala-32 to |
| | Ala-40, Glu-93 to Phe-103, Lys-173 to Thr-189. |
| 841237 | Preferred epitopes include those comprising a sequence |
| | shown in SEQ ID NO. 1383 as residues: Arg-2 to |
| | Gln-12, Lys-76 to Ala-86, Tyr-155 to Lys-163, Glu-228 |
| | to Leu-234, Lys-263 to Lys-273, Ile-286 to Lys-296. |
| 841241 | Preferred epitopes include those comprising a sequence |
| | shown in SEQ ID NO. 1384 as residues: Asp-41 to |
| | Ile-52, Thr-59 to Lys-64, Glu-75 to Asn-89, Thr-99 |
| | to Thr-105. |
| 841259 | Preferred epitopes include those comprising a sequence |
| | shown in SEQ ID NO. 1385 as residues: His-1 to |
| | Cys-22, Pro-24 to Pro-30, Tyr-84 to Ser-90, Ser-108 to |
| | Glu-118, Val-126 to Arg-143, Asp-175 to Gln-181, |
| | Ser-217 to Gly-224, Cys-262 to Cys-270, Tyr-296 to |
| | Glu-302, Thr-317 to Thr-324, Gln-341 to Gln-348, |
| | Trp-394 to Pro-399. |
| 841260 | Preferred epitopes include those comprising a sequence |
| | shown in SEQ ID NO. 1386 as residues: Ala-25 to |
| | Glu-32, Ala-48 to Phe-53, Ser-69 to Ser-76, Asp-80 to |
| | Glu-86, Ser-125 to Ser-132, Ser-168 to Glu-179, |
| | Asn-201 to Ala-206, Lys-216 to Ile-246, Met-259 to |
| | Asn-272, Tyr-277 to Gln-287. |
| 841264 | Preferred epitopes include those comprising a sequence |
| | shown in SEQ ID NO. 1387 as residues: Met-34 to |
| | Gly-50, Asp-69 to Trp-90, Asp-99 to Lys-107, Val-164 |
| | to Thr-170. |
| 841311 | Preferred epitopes include those comprising a sequence |
| | shown in SEQ ID NO. 1389 as residues: |
| | Arg-4 to Val-15. |
| 841313 | Preferred epitopes include those comprising a sequence |
| | shown in SEQ ID NO. 1390 as residues: His-6 to |
| | Gly-16, Gly-60 to Pro-95, Pro-125 to Gly-131, Gly-138 |
| | to Ala-147, Gln-173 to Glu-178. |
| 841322 | Preferred epitopes include those comprising a sequence |
| | shown in SEQ ID NO. 1392 as residues: Lys-6 to |
| | Arg-23, Ser-74 to Arg-86, Lys-116 to Lys-122, Ser-127 |
| | to His-133, Ser-269 to Pro-275, Glu-344 to Phe-350, |
| | Gly-356 to His-362. |
| 841331 | Preferred epitopes include those comprising a sequence |
| | shown in SEQ ID NO. 1393 as residues: Ser-45 to |
| | Lys-67, Asp-155 to Asp-172, Gln-193 to Ile-199, |
| | Gln-271 to Glu-285. |
| 841332 | Preferred epitopes include those comprising a sequence |
| | shown in SEQ ID NO. 1394 as residues: Glu-8 to |
| | Ser-13, Lys-20 to Glu-27, Arg-81 to Ser-94, Thr-147 to |
| | Ile-154, Asn-200 to Glu-212, Asn-235 to Gly-244, |
| | Leu-433 to Thr-439, Pro-444 to Asn-455, Ser-470 to |
| | Asp-476, Ser-492 to Met-499, Glu-535 to Pro-547, |
| | Glu-703 to Thr-709, Glu-719 to Thr-726, Asn-802 to |
| | Leu-807, Asn-820 to Arg-825, Lys-830 to Tyr-836, |
| | Thr-838 to Thr-850, Ser-882 to Ser-894, Lys-944 to |
| | Gly-952, Gly-969 to Val-977, Glu-984 to Asn-990, |
| | Arg-996 to Lys-1001, Pro-1032 to Leu-1039, Thr-1050 |
| | to Gly-1058, Val-1103 to Arg-1108, Pro-1160 to |
| | His-1169, Tyr-1180 to Ser-1187, Glu-1211 to Ser-1217, |
| | Pro-1277 to Leu-1282. |
| 841338 | Preferred epitopes include those comprising a sequence |
| | shown in SEQ ID NO. 1395 as residues: Ser-13 |
| | to Ser-18, Phe-48 to Ser-54. |
| 841345 | Preferred epitopes include those comprising a sequence |
| | shown in SEQ ID NO. 1396 as residues: Trp-83 to Thr-89, |
| | Ser-135 to Asn-140, Ser-185 to Cys-190, Tyr-209 to |
| | Glu-220, Val-224 to Glu-232, Leu-258 to Asn-263, |
| | Ser-306 to Asn-312, Thr-319 to Glu-327, Thr-365 to |
| | Ile-373, Gly-417 to Cys-429, Lys-439 to Val-445, |
| | Lys-464 to Leu-469, Leu-477 to Asn-485, Arg-546 to |
| | Val-554, Glu-598 to Gly-607, Pro-634 to Ser-639, |
| | Asn-730 to Ala-746, Lys-812 to Gln-817, Glu-819 |
| | to Lys-835, Leu-867 to Asn-875, Leu-902 to Arg-910. |
| 841349 | Preferred epitopes include those comprising a sequence |
| | shown in SEQ ID NO. 1397 as residues: Asp-13 |
| | to Arg-18, Pro-36 to Arg-43, Gly-66 to Ser-74, Gly-87 |
| | to Lys-92, Asp-110 to Glu-115. |
| 841417 | Preferred epitopes include those comprising a sequence |
| | shown in SEQ ID NO. 1399 as residues: Leu-102 to |
| | Ile-111, Pro-131 to Ile-337, Thr-339 to Asp-376. |
| 841632 | Preferred epitopes include those comprising a sequence |
| | shown in SEQ ID NO. 1401 as residues: Arg-13 to |
| | Gly-40, Arg-46 to Glu-52, Gln-55 to Lys-69. |
| 841771 | Preferred epitopes include those comprising a sequence |
| | shown in SEQ ID NO. 1403 as residues: Pro-22 to |
| | Gly-30, Asp-45 to Gln-56, Ser-67 to Ser-73. |
| 841827 | Preferred epitopes include those comprising a sequence |
| | shown in SEQ ID NO. 1404 as residues: |
| | Thr-1 to Ser-20. |
| 841835 | Preferred epitopes include those comprising a sequence |
| | shown in SEQ ID NO. 1405 as residues: Tyr-5 to |
| | Lys-13, Cys-52 to Arg-61, Cys-85 to Ala-91, Gly-122 |
| | to Asn-127. |
| 842259 | Preferred epitopes include those comprising a sequence |
| | shown in SEQ ID NO. 1406 as residues: Pro-16 to |
| | Gly-23, Glu-37 to Pro-45, Gly-52 to Ser-57. |
| 842463 | Preferred epitopes include those comprising a sequence |
| | shown in SEQ ID NO. 1407 as residues: |
| | Cys-74 to Tyr-79. |
| 842595 | Preferred epitopes include those comprising a sequence |
| | shown in SEQ ID NO. 1408 as residues: Pro-93 to |
| | Ala-105, Ser-133 to Ser-142, Arg-150 to Glu-155, |
| | Lys-220 to Trp-226, Glu-257 to Lys-271, Gln-280 |
| | to Leu-289. |
| 842722 | Preferred epitopes include those comprising a sequence |
| | shown in SEQ ID NO. 1409 as residues: Glu-9 to |
| | Arg-20, Ser-48 to Lys-56, Ile-69 to Glu-81, Pro-83 to |
| | Lys-89, Lys-94 to Ile-99, Pro-104 to Gly-110, Glu-116 |
| | to Asp-133, Ile-140 to Ser-154, Gln-206 to His-217, |
| | Pro-219 to Leu-231, Arg-237 to Lys-243, Gln-247 to |
| | Pro-256, Leu-271 to Thr-283, Lys-289 to Lys-294, |
| | Ser-338 to Lys-355, Gly-375 to Thr-381, Ser-428 to |
| | Pro-454, Gly-460 to Gln-467, Lys-480 to Lys-488. |
| 842818 | Preferred epitopes include those comprising a sequence |
| | shown in SEQ ID NO. 1411 as residues: Ala-25 to |
| | Ala-30, Lys-32 to Ala-51, Gln-61 to Ala-68, Glu-83 to |
| | Lys-91, Phe-99 to Glu-105, Glu-123 to Gly-129. |
| 843251 | Preferred epitopes include those comprising a sequence |
| | shown in SEQ ID NO. 1412 as residues: Pro-30 to |
| | Ser-40, Lys-47 to Thr-52, Val-59 to Pro-64, Lys-129 |
| | to Arg-134, Leu-169 to Asp-177. |
| 843422 | Preferred epitopes include those comprising a sequence |
| | shown in SEQ ID NO. 1413 as residues: Thr-9 to |
| | Lys-20, Lys-25 to Cys-31, Pro-33 to Tyr-42, Asn-76 to |
| | Lys-84, Leu-102 to Trp-112. |
| 843784 | Preferred epitopes include those comprising a sequence |
| | shown in SEQ ID NO. 1414 as residues: Leu-16 to |
| | Thr-24, Glu-41 to Gln-47, Lys-64 to Cys-72, Thr-87 to |
| | Ser-100, Pro-130 to Asn-143, Thr-163 to Asp-170. |
| 844017 | Preferred epitopes include those comprising a sequence |
| | shown in SEQ ID NO. 1415 as residues Leu-11 to |
| | Ile-17, Leu-30 to Met-45. |
| 844138 | Preferred epitopes include those comprising a sequence |
| | shown in SEQ ID NO. 1416 as residues: Lys-19 to |
| | Thr-28, Arg-47 to Gln-52, Leu-73 to Leu-81, Asp-122 to |
| | Phe-131, Ala-135 to Ser-148, Pro-155 to Asp-163, |
| | Ser-184 to His-191, Leu-219 to Asn-225, Asp-238 to |
| | Thr-248, Pro-253 to Cys-259, Cys-356 to His-368, |
| | Ser-426 to Gly-435, Pro-467 to Cys-478, Glu-504 to |
| | Cys-509, His-553 to Gly-568, Ala-581 to Cys-586, |
| | Ala-595 to Cys-600, Arg-602 to Trp-608. |
| 844194 | Preferred epitopes include those comprising a sequence |
| | shown in SEQ ID NO. 1418 as residues: Pro-23 to |
| | Arg-31, Gln-79 to Gln-85, Cys-93 to Cys-107, Pro-216 |
| | to Leu-222. |
| 844394 | Preferred epitopes include those comprising a sequence |
| | shown in SEQ ID NO. 1419 as residues: |
| | Arg-1 to Phe-11. |
| 844450 | Preferred epitopes include those comprising a sequence |
| | shown in SEQ ID NO. 1420 as residues: Ser-37 to |
| | Trp-43, Pro-47 to Thr-55, Arg-60 to Lys-69, Tyr-125 to |
| | His-131, Pro-187 to Lys-195, Gly-346 to Lys-351. |
| 844535 | Preferred epitopes include those comprising a sequence |
| | shown in SEQ ID NO. 1422 as residues: Asp-8 to |
| | Ala-18, Ser-47 to Ala-52, Thr-62 to Arg-69, Pro-119 to |
| | Asp-126, Trp-164 to Thr-170, Ala-206 to Ala-213, |
| | Pro-230 to Gly-235, Lys-304 to Lys-314, Lys-341 to |
| | Val-347, Tyr-387 to Thr-398. |
| 844644 | Preferred epitopes include those comprising a sequence |
| | shown in SEQ ID NO. 1423 as residues: Ala-9 to |
| | Asp-16, Asn-78 to Tyr-86. |
| 844653 | Preferred epitopes include those comprising a sequence |
| | shown in SEQ ID NO. 1424 as residues: Arg-1 to |
| | Gly-8, Ala-30 to Gln-36. |
| 844796 | Preferred epitopes include those comprising a sequence |
| | shown in SEQ ID NO. 1426 as residues: |
| | His-12 to His-22. |
| 844812 | Preferred epitopes include those comprising a sequence |
| | shown in SEQ ID NO. 1427 as residues: Gly-281 to |
| | Arg-290, Ala-349 to Ser-355, Glu-378 to Asp-388. |
| 844894 | Preferred epitopes include those comprising a sequence |
| | shown in SEQ ID NO. 1428 as residues: Pro-2 to |
| | Phe-8, Ser-13 to Ala-34, Pro-37 to Phe-43, Lys-63 to |
| | Gly-73, Cys-88 to Asp-93, Gly-98 to Trp-103, |
| | Cys-273 to Ile-287, Ile-290 to Ser-296. |
| 845361 | Preferred epitopes include those comprising a sequence |
| | shown in SEQ ID NO. 1429 as residues: Met-10 to |
| | Ile-21, Glu-108 to Lys-122, Lys-272 to Gly-280, Gly-298 |
| | to Lys-304, Trp-364 to Lys-369. |
| 845620 | Preferred epitopes include those comprising a sequence |
| | shown in SEQ ID NO. 1430 as residues: Thr-62 to |
| | Ala-67, Leu-96 to Glu-101, Cys-184 to Trp-190. |
| 845639 | Preferred epitopes include those comprising a sequence |
| | shown in SEQ ID NO. 1431 as residues: Arg-41 to |
| | Arg-48, Met-72 to Val-79, Gln-81 to Trp-89, Ala-96 to |
| | Asp-101, Arg-110 to Gly-118, Asn-126 to Arg-135, |
| | Ala-144 to Asp-149, Leu-199 to Lys-213, Gln-245 |
| | to Glu-256, Arg-261 to Thr-267. |
| 845660 | Preferred epitopes include those comprising a sequence |
| | shown in SEQ ID NO. 1432 as residues: Gly-5 to |
| | Leu-17, Arg-19 to Arg-29, Pro-36 to Arg-50, Arg-60 to |
| | Pro-67, Gln-133 to Leu-150, Gln-168 to Phe-187, |
| | Pro-189 to Gln-194, Asp-240 to Gly-251, Thr-308 to |
| | Cys-317, Val-325 to Glu-331, Leu-354 to Pro-369, |
| | Lys-381 to Cys-388, Arg-410 to Phe-417. |
| 845720 | Preferred epitopes include those comprising a sequence |
| | shown in SEQ ID NO. 1433 as residues: Thr-1 to |
| | Glu-11, Arg-21 to Pro-27, Pro-44 to His-49, Glu-56 to |
| | Leu-69, Ala-74 to Gly-80, Phe-82 to Pro-87. |
| 845897 | Preferred epitopes include those comprising a sequence |
| | shown in SEQ ID NO. 1435 as residues: Gly-1 to |
| | Ser-9, Gly-31 to Ser-38, Arg-52 to Val-68, Leu-71 |
| | to Gln-84. |
| 845922 | Preferred epitopes include those comprising a sequence |
| | shown in SEQ ID NO. 1436 as residues: Asn-1 to |
| | Pro-6, Pro-29 to Gln-36, Glu-95 to Arg-100, Pro-150 to |
| | Met-157, Ser-272 to Tyr-278, Gly-289 to Arg-294, |
| | Lys-397 to Ser-403. |
| 846040 | Preferred epitopes include those comprising a sequence |
| | shown in SEQ ID NO. 1438 as residues: Cys-6 to |
| | Ser-16, Glu-52 to Tyr-58, Asn-144 to Lys-153. |
| 846073 | Preferred epitopes include those comprising a sequence |
| | shown in SEQ ID NO. 1439 as residues: Arg-6 to |
| | Thr-16, Ile-43 to Gln-48, Leu-131 to Gly-139, Gly-147 |
| | to Asp-155, Asp-191 to Asp-198, Gly-204 to Thr-214. |
| 846257 | Preferred epitopes include those comprising a sequence |
| | shown in SEQ ID NO. 1440 as residues: Lys-24 to |
| | Phe-44, Arg-58 to Gly-64, Ser-69 to Val-75, Lys-83 to |
| | Leu-90, Lys-93 to Glu-106. |
| HTXPN06R | Preferred epitopes include those comprising a sequence |
| | shown in SEQ ID NO. 1441 as residues: Gly-1 to His-8. |
| HWAFU16R | Preferred epitopes include those comprising a sequence |
| | shown in SEQ ID NO. 1443 as residues: |
| | Ile-29 to Lys-34. |
| HOEMT44R | Preferred epitopes include those comprising a sequence |
| | shown in SEQ ID NO. 1445 as residues: |
| | Asp-73 to Lys-79. |
| HE2OW04R | Preferred epitopes include those comprising a sequence |
| | shown in SEQ ID NO. 1446 as residues: Cys-1 to Asn-6, |
| | Met-41 to Thr-51, Lys-77 to Thr-82. |
| HFCFG25R | Preferred epitopes include those comprising a sequence |
| | shown in SEQ ID NO. 1447 as residues: Lys-29 to |
| | Ile-37, Arg-42 to Lys-47. |
| HAPQP94R | Preferred epitopes include those comprising a sequence |
| | shown in SEQ ID NO. 1448 as residues: Pro-18 to |
| | Arg-23, Ala-43 to Ser-48. |
| H2CBI37R | Preferred epitopes include those comprising a sequence |
| | shown in SEQ ID NO. 1449 as residues: Gly-5 to |
| | Lys-19, Phe-26 to Trp-31. |
| HCRNC25R | Preferred epitopes include those comprising a sequence |
| | shown in SEQ ID NO. 1451 as residues: Leu-2 to Asn-8. |
| H2LAY26R | Preferred epitopes include those comprising a sequence |
| | shown in SEQ ID NO. 1453 as residues: |
| | Pro-20 to His-36. |
| HAPQA06R | Preferred epitopes include those comprising a sequence |
| | shown in SEQ ID NO. 1454 as residues: Tyr-15 to |
| | Ala-22, Ser-68 to Gly-74. |
| HBGOK18R | Preferred epitopes include those comprising a sequence |
| | shown in SEQ ID NO. 1456 as residues: Gly-1 to Tyr-6, |
| | Asp-40 to Thr-47, Lys-91 to Glu-97. |
| HTWKF26R | Preferred epitopes include those comprising a sequence |
| | shown in SEQ ID NO. 1458 as residues: |
| | Gly-31 to Gly-39. |
| HTAHR89R | Preferred epitopes include those comprising a sequence |
| | shown in SEQ ID NO. 1459 as residues: |
| | Asp-73 to Gly-78. |
| HOELC27R | Preferred epitopes include those comprising a sequence |
| | shown in SEQ ID NO. 1461 as residues: Asn-19 to |
| | Gln-25, Arg-33 to Ala-42, Pro-92 to Lys-99. |
| HWLVW62R | Preferred epitopes include those comprising a sequence |
| | shown in SEQ ID NO. 1463 as residues: Lys-6 to |
| | Phe-13, His-25 to Ser-30, Glu-35 to Ala-41, |
| | Pro-57 to Gly-62. |
| HFKHD94R | Preferred epitopes include those comprising a sequence |
| | shown in SEQ ID NO. 1465 as residues: Leu-1 to Gly-6, |
| | Pro-29 to Gly-42, Lys-52 to Gly-62. |
| HOFOA89R | Preferred epitopes include those comprising a sequence |
| | shown in SEQ ID NO. 1467 as residues: Ala-20 to |
| | Lys-29, Arg-48 to Ile-56. |
| HCROL58R | Preferred epitopes include those comprising a sequence |
| | shown in SEQ ID NO. 1470 as residues: |
| | Lys-1 to Ser-16. |
| HCHMV24R | Preferred epitopes include those comprising a sequence |
| | shown in SEQ ID NO. 1473 as residues: Gly-4 to |
| | Lys-10, Gln-36 to Glu-41. |
| HCHPT49R | Preferred epitopes include those comprising a sequence |
| | shown in SEQ ID NO. 1474 as residues: Gly-4 to |
| | Lys-10, Gln-36 to Glu-41, Arg-61 to Arg-70. |
| HCHPF59R | Preferred epitopes include those comprising a sequence |
| | shown in SEQ ID NO. 1477 as residues: |
| | Arg-10 to Lys-22. |
| HS2IA81R | Preferred epitopes include those comprising a sequence |
| | shown in SEQ ID NO. 1478 as residues: Gly-4 to |
| | Lys-10, Gln-36 to Glu-41, Arg-61 to Arg-76. |
| HCRNC17R | Preferred epitopes include those comprising a sequence |
| | shown in SEQ ID NO. 1479 as residues: Gly-4 to |
| | Lys-10, Gln-36 to Glu-41, Arg-61 to Arg-76, Lys-107 |
| | to Pro-112. |
| HISDJ39R | Preferred epitopes include those comprising a sequence |
| | shown in SEQ ID NO. 1480 as residues: Gly-4 to |
| | Lys-10, Gln-36 to Glu-41, Arg-61 to Arg-76. |
| HASCG71R | Preferred epitopes include those comprising a sequence |
| | shown in SEQ ID NO. 1482 as residues: |
| | Lys-6 to Ile-13. |
| HOEMO43R | Preferred epitopes include those comprising a sequence |
| | shown in SEQ ID NO. 1483 as residues: |
| | Lys-31 to Gln-43. |
| HSYDG18R | Preferred epitopes include those comprising a sequence |
| | shown in SEQ ID NO. 1486 as residues: Pro-1 to Glu-7, |
| | Asp-42 to Gly-47, Leu-61 to Glu-69, Lys-97 to Ile-107, |
| | Asp-115 to Gly-120. |
| HACAC47R | Preferred epitopes include those comprising a sequence |
| | shown in SEQ ID NO. 1490 as residues: |
| | Ala-18 to Asp-26. |
| HLQFY41R | Preferred epitopes include those comprising a sequence |
| | shown in SEQ ID NO. 1491 as residues: Val-11 to |
| | Asp-16, Glu-46 to Arg-51, Pro-55 to Lys-61, |
| | Lys-82 to Val-87. |
| HOFMO83R | Preferred epitopes include those comprising a sequence |
| | shown in SEQ ID NO. 1492 as residues: Thr-31 to |
| | Asp-39, Thr-52 to Gly-60. |
| HFTDR22R | Preferred epitopes include those comprising a sequence |
| | shown in SEQ ID NO. 1493 as residues: |
| | Glu-1 to Trp-13. |
| HOEKC39R | Preferred epitopes include those comprising a sequence |
| | shown in SEQ ID NO. 1495 as residues: |
| | Tyr-25 to Phe-32. |
| HOSNR06R | Preferred epitopes include those comprising a sequence |
| | shown in SEQ ID NO. 1498 as residues: Thr-1 to Tyr-7. |
| HCQDL20R | Preferred epitopes include those comprising a sequence |
| | shown in SEQ ID NO. 1499 as residues: |
| | Ser-12 to His-21. |
| HFKHD49R | Preferred epitopes include those comprising a sequence |
| | shown in SEQ ID NO. 1503 as residues: |
| | Ala-42 to Glu-68. |
| H6EAQ15R | Preferred epitopes include those comprising a sequence |
| | shown in SEQ ID NO. 1506 as residues: Ala-1 to Leu-9. |
| HCFLM34R | Preferred epitopes include those comprising a sequence |
| | shown in SEQ ID NO. 1507 as residues: Lys-7 to |
| | Thr-13, Asp-24 to Thr-30, Gly-39 to Glu-52, |
| | Leu-70 to Ile-78. |
| HKIXL19R | Preferred epitopes include those comprising a sequence |
| | shown in SEQ ID NO. 1510 as residues: Thr-2 to |
| | Asn-12, Gly-14 to Arg-24. |
| HAJRB09R | Preferred epitopes include those comprising a sequence |
| | shown in SEQ ID NO. 1512 as residues: Pro-1 to Glu-8, |
| | Ala-10 to Gly-26. |
| HAPNI86R | Preferred epitopes include those comprising a sequence |
| | shown in SEQ ID NO. 1513 as residues: Glu-53 to |
| | Ser-59, His-121 to Gln-130. |
| HAPRJ22R | Preferred epitopes include those comprising a sequence |
| | shown in SEQ ID NO. 1515 as residues: Gly-49 to |
| | Glu-64, Phe-76 to Thr-81. |
| HADGE45R | Preferred epitopes include those comprising a sequence |
| | shown in SEQ ID NO. 1518 as residues: Arg-1 to |
| | Gln-26, Phe-59 to Lys-68. |
| HTXPN11R | Preferred epitopes include those comprising a sequence |
| | shown in SEQ ID NO. 1519 as residues: Asp-1 to Lys-8, |
| | Asp-35 to Glu-41. |
| HCDBN37R | Preferred epitopes include those comprising a sequence |
| | shown in SEQ ID NO. 1520 as residues: |
| | Cys-1 to Leu-15. |
| HABGF46R | Preferred epitopes include those comprising a sequence |
| | shown in SEQ ID NO. 1527 as residues: Arg-11 to |
| | Arg-20, Asn-42 to Pro-57, Arg-64 to Ser-81. |
| HOELC15R | Preferred epitopes include those comprising a sequence |
| | shown in SEQ ID NO. 1528 as residues: His-8 to |
| | Gly-18, Gln-56 to Arg-61. |
| H2LAR26R | Preferred epitopes include those comprising a sequence |
| | shown in SEQ ID NO. 1529 as residues: Glu-11 to |
| | Asn-16, Lys-38 to Glu-43, Ala-62 to Asp-67, |
| | Asp-80 to Ser-101. |
| H2LAV85R | Preferred epitopes include those comprising a sequence |
| | shown in SEQ ID NO. 1530 as residues: Pro-14 to |
| | Thr-25, Asp-89 to Gln-102, Ile-121 to Thr-131. |
| HBSDC92R | Preferred epitopes include those comprising a sequence |
| | shown in SEQ ID NO. 1531 as residues: |
| | Arg-1 to Leu-11. |
| HUTHN01R | Preferred epitopes include those comprising a sequence |
| | shown in SEQ ID NO. 1532 as residues: Pro-34 to |
| | Ser-42, Cys-82 to Lys-89. |
| H2LAW03R | Preferred epitopes include those comprising a sequence |
| | shown in SEQ ID NO. 1533 as residues: |
| | Arg-120 to Arg-127. |
| HOEMO60R | Preferred epitopes include those comprising a sequence |
| | shown in SEQ ID NO. 1534 as residues: Pro-6 to |
| | Arg-11, Phe-18 to Asn-23, Leu-36 to Thr-41. |
| HOELF72R | Preferred epitopes include those comprising a sequence |
| | shown in SEQ ID NO. 1537 as residues: Arg-1 to |
| | Pro-14, Gln-47 to Cys-52. |
| HAPNX59R | Preferred epitopes include those comprising a sequence |
| | shown in SEQ ID NO. 1538 as residues: Cys-19 to |
| | Ser-25, Asp-28 to Trp-34, Lys-71 to Trp-76, |
| | Glu-112 to Lys-120. |
| HBJJS17R | Preferred epitopes include those comprising a sequence |
| | shown in SEQ ID NO. 1539 as residues: |
| | His-14 to Glu-26. |
| H2CBN02R | Preferred epitopes include those comprising a sequence |
| | shown in SEQ ID NO. 1542 as residues: Ala-1 to Pro-9, |
| | Arg-20 to Val-25. |
| H2CBV68R | Preferred epitopes include those comprising a sequence |
| | shown in SEQ ID NO. 1543 as residues: Pro-41 to |
| | Asp-46, Leu-56 to Lys-61, Ala-72 to Thr-83, Lys-100 |
| | to Asn-106, Leu-125 to Thr-133. |
| H6EDK07R | Preferred epitopes include those comprising a sequence |
| | shown in SEQ ID NO. 1544 as residues: Glu-32 to |
| | Glu-40, Val-45 to Thr-51, Pro-61 to Arg-67. |
| H2CBN54R | Preferred epitopes include those comprising a sequence |
| | shown in SEQ ID NO. 1547 as residues: Cys-36 to |
| | Tyr-44, Glu-55 to Asp-61, Arg-79 to Pro-84, Asp-89 to |
| | Pro-105, Cys-108 to Ala-118, Lys-126 to Gly-142. |
| HWHPX50R | Preferred epitopes include those comprising a sequence |
| | shown in SEQ ID NO. 1549 as residues: |
| | Pro-35 to Tyr-41. |
| HAPQD84R | Preferred epitopes include those comprising a sequence |
| | shown in SEQ ID NO. 1550 as residues: |
| | Lys-32 to Glu-39. |
| HAMGQ78R | Preferred epitopes include those comprising a sequence |
| | shown in SEQ ID NO. 1554 as residues: Arg-46 to |
| | Arg-60, Glu-69 to Gly-78. |
| HODEV64R | Preferred epitopes include those comprising a sequence |
| | shown in SEQ ID NO. 1555 as residues: Glu-1 to |
| | Gly-27, Asn-34 to Phe-48, Gly-63 to Gly-68. |
| HOEMK78R | Preferred epitopes include those comprising a sequence |
| | shown in SEQ ID NO. 1558 as residues: Asp-27 to |
| | Gly-34, Ser-41 to Glu-49, Val-55 to Gln-62. |
| H2CBD13R | Preferred epitopes include those comprising a sequence |
| | shown in SEQ ID NO. 1559 as residues: Ile-17 to |
| | His-22, Ser-24 to Arg-29. |
| HCFMU61R | Preferred epitopes include those comprising a sequence |
| | shown in SEQ ID NO. 1560 as residues: Ser-10 to |
| | Asp-20, Leu-22 to Pro-36, Ser-42 to Lys-57, Gln-102 |
| | to Glu-110. |
| HOSNE94R | Preferred epitopes include those comprising a sequence |
| | shown in SEQ ID NO. 1561 as residues: Arg-1 to Glu-6, |
| | Asp-74 to Ser-79, Asp-122 to Thr-127. |
| HHBEF47R | Preferred epitopes include those comprising a sequence |
| | shown in SEQ ID NO. 1563 as residues: Arg-25 to |
| | His-31, Ala-50 to Ala-55. |
| HOSNR67R | Preferred epitopes include those comprising a sequence |
| | shown in SEQ ID NO. 1566 as residues: Val-56 to |
| | Cys-61, Thr-108 to Gln-122, Gln-125 to Lys-131, |
| | Glu-140 to Leu-146. |
| H2LAV92R | Preferred epitopes include those comprising a sequence |
| | shown in SEQ ID NO. 1567 as residues: Leu-3 to |
| | to Ala-10, Pro-12 to Gly-21, Pro-32 to Pro-38, |
| | Ala-58 to Lys-64, Lys-67 to Val-75, Asp-92 to |
| | Leu-103. |
| HCLBZ27R | Preferred epitopes include those comprising a sequence |
| | shown in SEQ ID NO. 1570 as residues: Asp-12 to |
| | Glu-18, Ala-22 to Ile-28, Ala-48 to Gly-60. |
| H2LAV11R | Preferred epitopes include those comprising a sequence |
| | shown in SEQ ID NO. 1571 as residues: Thr-5 to |
| | Thr-14, Arg-20 to His-25, Arg-35 to Gly-40, Lys-58 to |
| | Arg-66, His-101 to Ser-107, Arg-111 to Lys-125. |
| HOEMJ56R | Preferred epitopes include those comprising a sequence |
| | shown in SEQ ID NO. 1573 as residues: |
| | Lys-27 to Tyr-48. |
| HDPLP40R | Preferred epitopes include those comprising a sequence |
| | shown in SEQ ID NO. 1576 as residues: Gly-1 to |
| | Cys-24, Cys-27 to Gly-43, Ala-46 to Trp-54, Ala-56 to |
| | Arg-68, Phe-83 to Arg-93. |
| HABAD57R | Preferred epitopes include those comprising a sequence |
| | shown in SEQ ID NO. 1578 as residues: Gly-3 to |
| | Gln-16, Pro-36 to Ala-41. |
| H2CBL68R | Preferred epitopes include those comprising a sequence |
| | shown in SEQ ID NO. 1581 as residues: Pro-19 to |
| | Val-24, Thr-31 to Gln-38, His-103 to Lys-114, Arg-129 |
| | to Leu-137, Pro-139 to Ser-146. |
| HNTNE17R | Preferred epitopes include those comprising a sequence |
| | shown in SEQ ID NO. 1582 as residues: Val-8 to |
| | Lys-15, Tyr-25 to Asn-35, Lys-48 to Lys-53, Leu-77 to |
| | Asn-87, Asp-103 to Glu-108. |
| HBJLR37R | Preferred epitopes include those comprising a sequence |
| | shown in SEQ ID NO. 1583 as residues: Asn-1 to |
| | His-11, Pro-82 to Glu-89, Pro-91 to Asp-96, |
| | Arg-103 to Met-109. |
| HOSNG20R | Preferred epitopes include those comprising a sequence |
| | shown in SEQ ID NO. 1584 as residues: |
| | Thr-50 to Lys-55. |
| HBGNY11R | Preferred epitopes include those comprising a sequence |
| | shown in SEQ ID NO. 1586 as residues: Thr-10 to |
| | Trp-15, Leu-24 to Ala-30, Leu-32 to Glu-38, Asn-41 to |
| | Ala-59, Arg-81 to Asp-89, Lys-104 to Lys-111. |
| HOEKC80R | Preferred epitopes include those comprising a sequence |
| | shown in SEQ ID NO. 1587 as residues: Pro-49 to |
| | Phe-55, Gly-82 to Gly-88. |
| HFCES53R | Preferred epitopes include those comprising a sequence |
| | shown in SEQ ID NO. 1589 as residues: |
| | Thr-12 to Leu-18. |
| HWAFE36R | Preferred epitopes include those comprising a sequence |
| | shown in SEQ ID NO. 1592 as residues: Glu-2 to Ile-9, |
| | Glu-34 to Lys-42. |
| HTXPF20R | Preferred epitopes include those comprising a sequence |
| | shown in SEQ ID NO. 1594 as residues: |
| | Gly-4 to Thr-13. |
| HCRMD09R | Preferred epitopes include those comprising a sequence |
| | shown in SEQ ID NO. 1595 as residues: Thr-2 to |
| | Asn-10, Glu-22 to Gln-30, Ser-58 to Gln-80, Gln-88 to |
| | Phe-96, Thr-99 to Tyr-104, Lys-110 to Asp-115. |
| HAJRB47R | Preferred epitopes include those comprising a sequence |
| | shown in SEQ ID NO. 1596 as residues: Trp-18 to |
| | Ser-26, Asp-91 to Trp-99. |
| HAHCR61R | Preferred epitopes include those comprising a sequence |
| | shown in SEQ ID NO. 1603 as residues: |
| | Ser-17 to Cys-25. |
| HAPQK19R | Preferred epitopes include those comprising a sequence |
| | shown in SEQ ID NO. 1609 as residues: Arg-1 to |
| | Lys-10, Ser-15 to Tyr-22, Gly-25 to Leu-31. |
| HBGOK25R | Preferred epitopes include those comprising a sequence |
| | shown in SEQ ID NO. 1615 as residues: Thr-38 to |
| | Trp-45, Pro-63 to Gln-70, Pro-78 to Gln-85. |
| HBJKI05R | Preferred epitopes include those comprising a sequence |
| | shown in SEQ ID NO. 1619 as residues: |
| | Pro-43 to Trp-50. |
| HBLGD42R | Preferred epitopes include those comprising a sequence |
| | shown in SEQ ID NO. 1621 as residues: Pro-17 to |
| | Pro-27, Pro-32 to Tyr-38, Ala-44 to Pro-49. |
| HCHAK80R | Preferred epitopes include those comprising a sequence |
| | shown in SEQ ID NO. 1627 as residues: Gln-3 to |
| | His-13, Gly-48 to Gly-55. |
| HCHMW79R | Preferred epitopes include those comprising a sequence |
| | shown in SEQ ID NO. 1628 as residues: Ser-16 to |
| | His-21, Ala-29 to Thr-35. |
| HCHOB92R | Preferred epitopes include those comprising a sequence |
| | shown in SEQ ID NO. 1629 as residues: Lys-20 to |
| | Lys-28, Ser-53 to Leu-60. |
| HCLBO01R | Preferred epitopes include those comprising a sequence |
| | shown in SEQ ID NO. 1630 as residues: |
| | Leu-1 to Leu-18. |
| HCRPC63R | Preferred epitopes include those comprising a sequence |
| | shown in SEQ ID NO. 1633 as residues: |
| | Glu-1 to Arg-28. |
| HCUDC51R | Preferred epitopes include those comprising a sequence |
| | shown in SEQ ID NO. 1634 as residues: Pro-22 to |
| | Gly-32, Trp-67 to Lys-81. |
| HDPFI40R | Preferred epitopes include those comprising a sequence |
| | shown in SEQ ID NO. 1635 as residues: Tyr-1 to Phe-6, |
| | Pro-9 to Asn-22, Arg-30 to Ala-38, Pro-47 to Lys-69. |
| HDPRZ54R | Preferred epitopes include those comprising a sequence |
| | shown in SEQ ID NO. 1637 as residues: Gly-1 to Ala-8. |
| HFAUO64R | Preferred epitopes include those comprising a sequence |
| | shown in SEQ ID NO. 1640 as residues: |
| | Asn-7 to Lys-29. |
| HJMAU64R | Preferred epitopes include those comprising a sequence |
| | shown in SEQ ID NO. 1645 as residues: |
| | Leu-58 to Tyr-69. |
| HKBAC48R | Preferred epitopes include those comprising a sequence |
| | shown in SEQ ID NO. 1647 as residues: Ser-16 to |
| | His-46, Arg-49 to Thr-58. |
| HKBAD57R | Preferred epitopes include those comprising a sequence |
| | shown in SEQ ID NO. 1648 as residues: |
| | Thr-23 to Ser-30. |
| HODAY16R | Preferred epitopes include those comprising a sequence |
| | shown in SEQ ID NO. 1653 as residues: |
| | Pro-15 to Thr-20. |
| HOEMO27R | Preferred epitopes include those comprising a sequence |
| | shown in SEQ ID NO. 1655 as residues: |
| | Ala-7 to Ser-12. |
| HOEMO62R | Preferred epitopes include those comprising a sequence |
| | shown in SEQ ID NO. 1656 as residues: |
| | Ile-3 to Lys-11. |
| HOENU53R | Preferred epitopes include those comprising a sequence |
| | shown in SEQ ID NO. 1658 as residues: |
| | Lys-37 to Asn-44. |
| HOGAP33R | Preferred epitopes include those comprising a sequence |
| | shown in SEQ ID NO. 1659 as residues: Gln-29 to |
| | Asp-35, Gln-43 to Thr-49. |
| HOSNF25R | Preferred epitopes include those comprising a sequence |
| | shown in SEQ ID NO. 1661 as residues: |
| | Pro-29 to Arg-36. |
| HPIAC23R | Preferred epitopes include those comprising a sequence |
| | shown in SEQ ID NO. 1663 as residues: |
| | Thr-62 to Thr-69. |
| HRAAD31R | Preferred epitopes include those comprising a sequence |
| | shown in SEQ ID NO. 1664 as residues: Val-1 to Thr-6 |
| | Arg-64 to Arg-69. |
| HRADJ57R | Preferred epitopes include those comprising a sequence |
| | shown in SEQ ID NO. 1666 as residues: |
| | Val-11 to Gln-16. |
| HROAX48R | Preferred epitopes include those comprising a sequence |
| | shown in SEQ ID NO. 1667 as residues: |
| | Gly-7 to Thr-20. |
| HTWDH05R | Preferred epitopes include those comprising a sequence |
| | shown in SEQ ID NO. 1670 as residues: Ala-5 to |
| | Lys-11, Arg-29 to Ser-36. |
| HUTHF75R | Preferred epitopes include those comprising a sequence |
| | shown in SEQ ID NO. 1673 as residues: |
| | Lys-40 to Gly-47. |
| HWAFW07R | Preferred epitopes include those comprising a sequence |
| | shown in SEQ ID NO. 1674 as residues: |
| | Phe-44 to Arg-49. |
| HWLLX91R | Preferred epitopes include those comprising a sequence |
| | shown in SEQ ID NO. 1676 as residues: |
| | Gly-29 to Asp-34. |
| HMIAI78R | Preferred epitopes include those comprising a sequence |
| | shown in SEQ ID NO. 1678 as residues: Lys-24 to |
| | Arg-29, Cys-34 to Ala-41. |
| HBGFJ39R | Preferred epitopes include those comprising a sequence |
| | shown in SEQ ID NO. 1679 as residues: |
| | Leu-21 to Asp-38. |
| HAMHH32R | Preferred epitopes include those comprising a sequence |
| | shown in SEQ ID NO. 1680 as residues: Ala-1 to |
| | Cys-10, Glu-15 to Gln-21. |
| HOSNE37R | Preferred epitopes include those comprising a sequence |
| | shown in SEQ ID NO. 1683 as residues: |
| | Lys-17 to Thr-23. |
| HWAFE41R | Preferred epitopes include those comprising a sequence |
| | shown in SEQ ID NO. 1684 as residues: Ser-3 to |
| | Lys-8, Trp-92 to Leu-97. |

[0106] The present invention encompasses polypeptides comprising, or alternatively consisting of, an epitope of the polypeptide sequence shown in SEQ ID NO:Y, or an epitope of the polypeptide sequence encoded by the cDNA in the related cDNA clone contained in a deposited library or encoded by a polynucleotide that hybridizes to the complement of an epitope encoding sequence of SEQ ID NO:X, or an epitope encoding sequence contained in the deposited cDNA clone under stringent hybridization conditions, or alternatively, under lower stringency hybridization conditions, as defined supra. The present invention further encompasses polynucleotide sequences encoding an epitope of a polypeptide sequence of the invention (such as, for example, the sequence disclosed in SEQ ID NO:X), polynucleotide sequences of the complementary strand of a polynucleotide sequence encoding an epitope of the invention, and polynucleotide sequences which hybridize to this complementary strand under stringent hybridization conditions or alternatively, under lower stringency hybridization conditions, as defined supra.

[0107] The term “epitopes,” as used herein, refers to portions of a polypeptide having antigenic or immunogenic activity in an animal, preferably a mammal, and most preferably in a human. In a preferred embodiment, the present invention encompasses a polypeptide comprising an epitope, as well as the polynucleotide encoding this polypeptide. An “immunogenic epitope,” as used herein, is defined as a portion of a protein that elicits an antibody response in an animal, as determined by any method known in the art, for example, by the methods for generating antibodies described infra. (See, for example, Geysen et al., Proc. Natl. Acad. Sci. USA 81:3998-4002 (1983)). The term “antigenic epitope,” as used herein, is defined as a portion of a protein to which an antibody can immunospecifically bind its antigen as determined by any method well known in the art, for example, by the immunoassays described herein. Immunospecific binding excludes non-specific binding but does not necessarily exclude cross- reactivity with other antigens. Antigenic epitopes need not necessarily be immunogenic.

[0108] Fragments which function as epitopes may be produced by any conventional means. (See, e.g., Houghten, R. A., Proc. Natl. Acad. Sci. USA 82:5131-5135 (1985) further described in U.S. Pat. No. 4,631,211.)

[0109] In the present invention, antigenic epitopes preferably contain a sequence of at least 4, at least 5, at least 6, at least 7, more preferably at least 8, at least 9, at least 10, at least 11, at least 12, at least 13, at least 14, at least 15, at least 20, at least 25, at least 30, at least 40, at least 50, and, most preferably, between about 15 to about 30 amino acids. Preferred polypeptides comprising immunogenic or antigenic epitopes are at least 10, 15, 20, 25, 30, 35, 40, 45, 50, 55, 60, 65, 70, 75, 80, 85, 90, 95, or 100 amino acid residues in length. Additional non-exclusive preferred antigenic epitopes include the antigenic epitopes disclosed herein, as well as portions thereof. Antigenic epitopes are useful, for example, to raise antibodies, including monoclonal antibodies, that specifically bind the epitope. Preferred antigenic epitopes include the antigenic epitopes disclosed herein, as well as any combination of two, three, four, five or more of these antigenic epitopes. Antigenic epitopes can be used as the target molecules in immunoassays. (See, for instance, Wilson et al., Cell 37:767-778 (1984); Sutcliffe et al., Science 219:660-666 (1983)).

[0110] Similarly, immunogenic epitopes can be used, for example, to induce antibodies according to methods well known in the art. (See, for instance, Sutcliffe et al., supra; Wilson et al., supra; Chow et al., Proc. Natl. Acad. Sci. USA 82:910-914; and Bittle et al., J. Gen. Virol. 66:2347-2354 (1985). Preferred immunogenic epitopes include the immunogenic epitopes disclosed herein, as well as any combination of two, three, four, five or more of these immunogenic epitopes. The polypeptides comprising one or more immunogenic epitopes may be presented for eliciting an antibody response together with a carrier protein, such as an albumin, to an animal system (such as rabbit or mouse), or, if the polypeptide is of sufficient length (at least about 25 amino acids), the polypeptide may be presented without a carrier. However, immunogenic epitopes comprising as few as 8 to 10 amino acids have been shown to be sufficient to raise antibodies capable of binding to, at the very least, linear epitopes in a denatured polypeptide (e.g., in Western blotting).

[0111] Epitope-bearing polypeptides of the present invention may be used to induce antibodies according to methods well known in the art including, but not limited to, in vivo immunization, in vitro immunization, and phage display methods. See, e.g., Sutcliffe et al., supra; Wilson et al., supra, and Bittle et al., J. Gen. Virol., 66:2347-2354 (1985). If in vivo immunization is used, animals may be immunized with free peptide; however, anti-peptide antibody titer may be boosted by coupling the peptide to a macromolecular carrier, such as keyhole limpet hemacyanin (KLH) or tetanus toxoid. For instance, peptides containing cysteine residues may be coupled to a carrier using a linker such as maleimidobenzoyl- N-hydroxysuccinimide ester (MBS), while other peptides may be coupled to carriers using a more general linking agent such as glutaraldehyde. Animals such as rabbits, rats and mice are immunized with either free or carrier- coupled peptides, for instance, by intraperitoneal and/or intradermal injection of emulsions containing about 100 μg of peptide or carrier protein and Freund's adjuvant or any other adjuvant known for stimulating an immune response. Several booster injections may be needed, for instance, at intervals of about two weeks, to provide a useful titer of anti-peptide antibody which can be detected, for example, by ELISA assay using free peptide adsorbed to a solid surface. The titer of anti-peptide antibodies in serum from an immunized animal may be increased by selection of anti-peptide antibodies, for instance, by adsorption to the peptide on a solid support and elution of the selected antibodies according to methods well known in the art.

[0112] As one of skill in the art will appreciate, and as discussed above, the polypeptides of the present invention, and immunogenic and/or antigenic epitope fragments thereof can be fused to other polypeptide sequences. For example, the polypeptides of the present invention may be fused with the constant domain of immunoglobulins (IgA, IgE, IgG, IgM), or portions thereof (CH1, CH2, CH3, or any combination thereof and portions thereof) resulting in chimeric polypeptides. Such fusion proteins may facilitate purification and may increase half-life in vivo. This has been shown for chimeric proteins consisting of the first two domains of the human CD4-polypeptide and various domains of the constant regions of the heavy or light chains of mammalian immunoglobulins. See, e.g., EP 394,827; Traunecker et al., Nature, 331:84-86 (1988). Enhanced delivery of an antigen across the epithelial barrier to the immune system has been demonstrated for antigens (e.g., insulin) conjugated to an FcRn binding partner such as IgG or Fc fragments (see, e.g., PCT Publications WO 96/22024 and WO 99/04813). IgG Fusion proteins that have a disulfide-linked dimeric structure due to the IgG portion desulfide bonds have also been found to be more efficient in binding and neutralizing other molecules than monomeric polypeptides or fragments thereof alone. See, e.g., Fountoulakis et al., J. Biochem., 270:3958-3964 (1995).

[0113] Similarly, EP-A-O 464 533 (Canadian counterpart 2045869) discloses fusion proteins comprising various portions of constant region of immunoglobulin molecules together with another human protein or part thereof. In many cases, the Fc part in a fusion protein is beneficial in therapy and diagnosis, and thus can result in, for example, improved pharmacokinetic properties. (EP-A 0232 262.) Alternatively, deleting the Fc part after the fusion protein has been expressed, detected, and purified, may be desired. For example, the Fc portion may hinder therapy and diagnosis if the fusion protein is used as an antigen for immunizations. In drug discovery, for example, human proteins, such as hIL-5, have been fused with Fc portions for the purpose of high-throughput screening assays to identify antagonists of hIL-5. (See, D. Bennett et al., J. Molecular Recognition 8:52-58 (1995); K. Johanson et al., J. Biol. Chem. 270:9459-9471 (1995).)

[0114] Moreover, the polypeptides of the present invention can be fused to marker sequences, such as a peptide which facilitates purification of the fused polypeptide. In preferred embodiments, the marker amino acid sequence is a hexa-histidine peptide, such as the tag provided in a pQE vector (QIAGEN, Inc., 9259 Eton Avenue, Chatsworth, Calif., 91311), among others, many of which are commercially available. As described in Gentz et al., Proc. Natl. Acad. Sci. USA 86:821-824 (1989), for instance, hexa-histidine provides for convenient purification of the fusion protein. Another peptide tag useful for purification, the “HA” tag, corresponds to an epitope derived from the influenza hemagglutinin protein. (Wilson et al., Cell 37:767 (1984).)

[0115] Thus, any of these above fusions can be engineered using the polynucleotides or the polypeptides of the present invention.

[0116] Nucleic acids encoding the above epitopes can also be recombined with a gene of interest as an epitope tag (e.g., the hemagglutinin (“HA”) tag or flag tag) to aid in detection and purification of the expressed polypeptide. For example, a system described by Janknecht et al. allows for the ready purification of non-denatured fusion proteins expressed in human cell lines (Janknecht et al., Proc. Natl. Acad. Sci. USA 88:8972-897 (1991)). In this system, the gene of interest is subcloned into a vaccinia recombination plasmid such that the open reading frame of the gene is translationally fused to an amino-terminal tag consisting of six histidine residues. The tag serves as a matrix binding domain for the fusion protein. Extracts from cells infected with the recombinant vaccinia virus are loaded onto Ni2+ nitriloacetic acid-agarose column and histidine-tagged proteins can be selectively eluted with imidazole-containing buffers.

[0117] Additional fusion proteins of the invention may be generated through the techniques of gene-shuffling, motif-shuffling, exon-shuffling, and/or codon-shuffling (collectively referred to as “DNA shuffling”). DNA shuffling may be employed to modulate the activities of polypeptides of the invention, such methods can be used to generate polypeptides with altered activity, as well as agonists and antagonists of the polypeptides. See, generally, U.S. Pat. Nos. 5,605,793; 5,811,238; 5,830,721; 5,834,252; and 5,837,458, and Patten et al., Curr. Opinion Biotechnol. 8:724-33 (1997); Harayama, Trends Biotechnol. 16(2):76-82 (1998); Hansson, et al., J. Mol. Biol. 287:265-76 (1999); and Lorenzo and Blasco, Biotechniques 24(2):308-13 (1998) (each of these patents and publications are hereby incorporated by reference in its entirety). In one embodiment, alteration of polynucleotides corresponding to SEQ ID NO:X and the polypeptides encoded by these polynucleotides may be achieved by DNA shuffling. DNA shuffling involves the assembly of two or more DNA segments by homologous or site-specific recombination to generate variation in the polynucleotide sequence. In another embodiment, polynucleotides of the invention, or the encoded polypeptides, may be altered by being subjected to random mutagenesis by error-prone PCR, random nucleotide insertion or other methods prior to recombination. In another embodiment, one or more components, motifs, sections, parts, domains, fragments, etc., of a polynucleotide encoding a polypeptide of the invention may be recombined with one or more components, motifs, sections, parts, domains, fragments, etc. of one or more heterologous molecules.

[0118] As discussed herein, any polypeptide of the present invention can be used to generate fusion proteins. For example, the polypeptide of the present invention, when fused to a second protein, can be used as an antigenic tag. Antibodies raised against the polypeptide of the present invention can be used to indirectly detect the second protein by binding to the polypeptide. Moreover, because secreted proteins target cellular locations based on trafficking signals, polypeptides of the present invention which are shown to be secreted can be used as targeting molecules once fused to other proteins.

[0119] Examples of domains that can be fused to polypeptides of the present invention include not only heterologous signal sequences, but also other heterologous functional regions. The fusion does not necessarily need to be direct, but may occur through linker sequences.

[0120] In certain preferred embodiments, proteins of the invention comprise fusion proteins wherein the polypeptides are N and/or C- terminal deletion mutants. In preferred embodiments, the application is directed to nucleic acid molecules at least 80%, 85%, 90%, 95%, 96%, 97%, 98% or 99% identical to the nucleic acid sequences encoding polypeptides having the amino acid sequence of the specific N- and C-terminal deletions mutants. Polynucleotides encoding these polypeptides are also encompassed by the invention.

[0121] Moreover, fusion proteins may also be engineered to improve characteristics of the polypeptide of the present invention. For instance, a region of additional amino acids, particularly charged amino acids, may be added to the N-terminus of the polypeptide to improve stability and persistence during purification from the host cell or subsequent handling and storage. Also, peptide moieties may be added to the polypeptide to facilitate purification. Such regions may be removed prior to final preparation of the polypeptide. The addition of peptide moieties to facilitate handling of polypeptides are familiar and routine techniques in the art.

[0122] Vectors, Host Cells, and Protein Production

[0123] The present invention also relates to vectors containing the polynucleotide of the present invention, host cells, and the production of polypeptides by recombinant techniques. The vector may be, for example, a phage, plasmid, viral, or retroviral vector. Retroviral vectors may be replication competent or replication defective. In the latter case, viral propagation generally will occur only in complementing host cells.

[0124] The polynucleotides of the invention may be joined to a vector containing a selectable marker for propagation in a host. Generally, a plasmid vector is introduced in a precipitate, such as a calcium phosphate precipitate, or in a complex with a charged lipid. If the vector is a virus, it may be packaged in vitro using an appropriate packaging cell line and then transduced into host cells.

[0125] The polynucleotide insert should be operatively linked to an appropriate promoter, such as the phage lambda PL promoter, the E. coli lac, trp, phoA and tac promoters, the SV40 early and late promoters and promoters of retroviral LTRs, to name a few. Other suitable promoters will be known to the skilled artisan. The expression constructs will further contain sites for transcription initiation, termination, and, in the transcribed region, a ribosome binding site for translation. The coding portion of the transcripts expressed by the constructs will preferably include a translation initiating codon at the beginning and a termination codon (UAA, UGA or UAG) appropriately positioned at the end of the polypeptide to be translated.

[0126] As indicated, the expression vectors will preferably include at least one selectable marker. Such markers include dihydrofolate reductase, G418 or neomycin resistance for eukaryotic cell culture and tetracycline, kanamycin or ampicillin resistance genes for culturing in E. coli and other bacteria. Representative examples of appropriate hosts include, but are not limited to, bacterial cells, such as E. coli, Streptomyces and Salmonella typhimurium cells; fungal cells, such as yeast cells (e.g., Saccharomyces cerevisiae or Pichia pastoris (ATCC Accession No. 201178)); insect cells such as Drosophila S2 and Spodoptera Sf9 cells; animal cells such as CHO, COS, 293, and Bowes melanoma cells; and plant cells. Appropriate culture mediums and conditions for the above-described host cells are known in the art.

[0127] Among vectors preferred for use in bacteria include pQE70, pQE60 and pQE-9, available from QIAGEN, Inc.; pBluescript vectors, Phagescript vectors, pNH8A, pNH16a, pNH18A, pNH46A, available from Stratagene Cloning Systems, Inc.; and ptrc99a, pKK223-3, pKK233-3, pDR540, pRIT5 available from Pharmacia Biotech, Inc. Among preferred eukaryotic vectors are pWLNEO, pSV2CAT, pOG44, pXT1 and pSG available from Stratagene; and pSVK3, pBPV, pMSG and pSVL available from Pharmacia. Preferred expression vectors for use in yeast systems include, but are not limited to pYES2, pYDI, pTEF1/Zeo, pYES2/GS, pPICZ, pGAPZ, pGAPZalph, pPIC9, pPIC3.5, pIL-D2, pHIL-Sl, pPIC3.5K, pPIC9K, and PA0815 (all available from Invitrogen, Carlbad, Calif.). Other suitable vectors will be readily apparent to the skilled artisan.

[0128] Introduction of the construct into the host cell can be effected by calcium phosphate transfection, DEAE-dextran mediated transfection, cationic lipid-mediated transfection, electroporation, transduction, infection, or other methods. Such methods are described in many standard laboratory manuals, such as Davis et al., Basic Methods In Molecular Biology (1986). It is specifically contemplated that the polypeptides of the present invention may in fact be expressed by a host cell lacking a recombinant vector.

[0129] A polypeptide of this invention can be recovered and purified from recombinant cell cultures by well-known methods including ammonium sulfate or ethanol precipitation, acid extraction, anion or cation exchange chromatography, phosphocellulose chromatography, hydrophobic interaction chromatography, affinity chromatography, hydroxylapatite chromatography and lectin chromatography. Most preferably, high performance liquid chromatography (“HPLC”) is employed for purification.

[0130] Polypeptides of the present invention can also be recovered from: products purified from natural sources, including bodily fluids, tissues and cells, whether directly isolated or cultured; products of chemical synthetic procedures; and products produced by recombinant techniques from a prokaryotic or eukaryotic host, including, for example, bacterial, yeast, higher plant, insect, and mammalian cells. Depending upon the host employed in a recombinant production procedure, the polypeptides of the present invention may be glycosylated or may be non-glycosylated. In addition, polypeptides of the invention may also include an initial modified methionine residue, in some cases as a result of host-mediated processes. Thus, it is well known in the art that the N-terminal methionine encoded by the translation initiation codon generally is removed with high efficiency from any protein after translation in all eukaryotic cells. While the N-terminal methionine on most proteins also is efficiently removed in most prokaryotes, for some proteins, this prokaryotic removal process is inefficient, depending on the nature of the amino acid to which the N-terminal methionine is covalently linked.

[0131] In one embodiment, the yeast Pichia pastoris is used to express polypeptides of the invention in a eukaryotic system. Pichia pastoris is a methylotrophic yeast which can metabolize methanol as its sole carbon source. A main step in the methanol metabolization pathway is the oxidation of methanol to formaldehyde using O₂. This reaction is catalyzed by the enzyme alcohol oxidase. In order to metabolize methanol as its sole carbon source, Pichia pastoris must generate high levels of alcohol oxidase due, in part, to the relatively low affinity of alcohol oxidase for 02. Consequently, in a growth medium depending on methanol as a main carbon source, the promoter region of one of the two alcohol oxidase genes (AOX1) is highly active. In the presence of methanol, alcohol oxidase produced from the AOX1 gene comprises up to approximately 30% of the total soluble protein in Pichia pastoris. See, Ellis, S. B., et al., Mol. Cell. Biol. 5:1111-21 (1985); Koutz, P. J, et al., Yeast 5:167-77 (1989); Tschopp, J. F., et al., Nucl. Acids Res. 15:3859-76 (1987). Thus, a heterologous coding sequence, such as, for example, a polynucleotide of the present invention, under the transcriptional regulation of all or part of the AOX1 regulatory sequence is expressed at exceptionally high levels in Pichia yeast grown in the presence of methanol.

[0132] In one example, the plasmid vector pPIC9K is used to express DNA encoding a polypeptide of the invention, as set forth herein, in a Pichea yeast system essentially as described in “Pichia Protocols: Methods in Molecular Biology,” D.R. Higgins and J. Cregg, eds. The Humana Press, Totowa, N.J., 1998. This expression vector allows expression and secretion of a polypeptide of the invention by virtue of the strong AOX1 promoter linked to the Pichia pastoris alkaline phosphatase (PHO) secretory signal peptide (i.e., leader) located upstream of a multiple cloning site.

[0133] Many other yeast vectors could be used in place of pPIC9K, such as, pYES2, pYDI, pTEF1/Zeo, pYES2/GS, pPICZ, pGAPZ, pGAPZalpha, pPIC9, pPIC3.5, pHIL-D2, pHIL-S1, pPIC3.5K, and PA0815, as one skilled in the art would readily appreciate, as long as the proposed expression construct provides appropriately located signals for transcription, translation, secretion (if desired), and the like, including an in-frame AUG as required.

[0134] In another embodiment, high-level expression of a heterologous coding sequence, such as, for example, a polynucleotide of the present invention, may be achieved by cloning the heterologous polynucleotide of the invention into an expression vector such as, for example, pGAPZ or pGAPZalpha, and growing the yeast culture in the absence of methanol.

[0135] In addition to encompassing host cells containing the vector constructs discussed herein, the invention also encompasses primary, secondary, and immortalized host cells of vertebrate origin, particularly mammalian origin, that have been engineered to delete or replace endogenous genetic material (e.g., coding sequence), and/or to include genetic material (e.g., heterologous polynucleotide sequences) that is operably associated with polynucleotides of the invention, and which activates, alters, and/or amplifies endogenous polynucleotides. For example, techniques known in the art may be used to operably associate heterologous control regions (e.g., promoter and/or enhancer) and endogenous polynucleotide sequences via homologous recombination (see, e.g., U.S. Pat. No. 5,641,670, issued Jun. 24, 1997; International Publication No. WO 96/29411, published Sep. 26, 1996; International Publication No. WO 94/12650, published Aug. 4, 1994; Koller et al., Proc. Natl. Acad. Sci. USA 86:8932-8935 (1989); and Zijlstra et al., Nature 342:435-438 (1989), the disclosures of each of which are incorporated by reference in their entireties).

[0136] In addition, polypeptides of the invention can be chemically synthesized using techniques known in the art (e.g., see Creighton, 1983, Proteins: Structures and Molecular Principles, W. H. Freeman & Co., N.Y., and Hunkapiller et al., Nature, 310:105-111 (1984)). For example, a polypeptide corresponding to a fragment of a polypeptide can be synthesized by use of a peptide synthesizer. Furthermore, if desired, nonclassical amino acids or chemical amino acid analogs can be introduced as a substitution or addition into the polypeptide sequence. Non-classical amino acids include, but are not limited to, to the D-isomers of the common amino acids, 2,4-diaminobutyric acid, a-amino isobutyric acid, 4-aminobutyric acid, Abu, 2-amino butyric acid, g-Abu, e-Ahx, 6-amino hexanoic acid, Aib, 2-amino isobutyric acid, 3-amino propionic acid, ornithine, norleucine, norvaline, hydroxyproline, sarcosine, citrulline, homocitrulline, cysteic acid, t-butylglycine, t-butylalanine, phenylglycine, cyclohexylalanine, b-alanine, fluoro-amino acids, designer amino acids such as b-methyl amino acids, Ca-methyl amino acids, Na-methyl amino acids, and amino acid analogs in general. Furthermore, the amino acid can be D (dextrorotary) or L (levorotary).

[0137] Non-naturally occurring variants may be produced using art-known mutagenesis techniques, which include, but are not limited to oligonucleotide mediated mutagenesis, alanine scanning, PCR mutagenesis, site directed mutagenesis (see, e.g., Carter et al., Nucl. Acids Res. 13:4331 (1986); and Zoller et al., Nucl. Acids Res. 10:6487 (1982)), cassette mutagenesis (see, e.g., Wells et al., Gene 34:315 (1985)), restriction selection mutagenesis (see, e.g., Wells et al., Philos. Trans. R. Soc. London SerA 317:415 (1986)).

[0138] The invention additionally, encompasses polypeptides of the present invention which are differentially modified during or after translation, e.g., by glycosylation, acetylation, phosphorylation, amidation, derivatization by known protecting/blocking groups, proteolytic cleavage, linkage to an antibody molecule or other cellular ligand, etc. Any of numerous chemical modifications may be carried out by known techniques, including but not limited, to specific chemical cleavage by cyanogen bromide, trypsin, chymotrypsin, papain, V8 protease, NaBH4; acetylation, formylation, oxidation, reduction; metabolic synthesis in the presence of tunicamycin; etc.

[0139] Additional post-translational modifications encompassed by the invention include, for example, e.g., N-linked or O-linked carbohydrate chains, processing of N-terminal or C-terminal ends), attachment of chemical moieties to the amino acid backbone, chemical modifications of N-linked or 0-linked carbohydrate chains, and addition or deletion of an N-terminal methionine residue as a result of procaryotic host cell expression. The polypeptides may also be modified with a detectable label, such as an enzymatic, fluorescent, isotopic or affinity label to allow for detection and isolation of the protein.

[0140] Also provided by the invention are chemically modified derivatives of the polypeptides of the invention which may provide additional advantages such as increased solubility, stability and circulating time of the polypeptide, or decreased immunogenicity (see U.S. Pat. No. 4,179,337). The chemical moieties for derivitization may be selected from water soluble polymers such as polyethylene glycol, ethylene glycol/propylene glycol copolymers, carboxymethylcellulose, dextran, polyvinyl alcohol and the like. The polypeptides may be modified at random positions within the molecule, or at predetermined positions within the molecule and may include one, two, three or more attached chemical moieties.

[0141] The polymer may be of any molecular weight, and may be branched or unbranched. For polyethylene glycol, the preferred molecular weight is between about 1 kDa and about 100 kDa (the term “about” indicating that in preparations of polyethylene glycol, some molecules will weigh more, some less, than the stated molecular weight) for ease in handling and manufacturing. Other sizes may be used, depending on the desired therapeutic profile (e.g., the duration of sustained release desired, the effects, if any on biological activity, the ease in handling, the degree or lack of antigenicity and other known effects of the polyethylene glycol to a therapeutic protein or analog). For example, the polyethylene glycol may have an average molecular weight of about 200; 500; 1000; 1500; 2000; 2500; 3000; 3500; 4000; 4500; 5000; 5500; 6000; 6500; 7000; 7500; 8000; 8500; 9000; 9500; 10,000; 10,500; 11,000; 11,500; 12,000; 12,500; 13,000; 13,500; 14,000; 14,500; 15,000; 15,500; 16,000; 16,500; 17,000; 17,500; 18,000; 18,500; 19,000; 19,500; 20,000; 25,000; 30,000; 35,000; 40,000; 50,000; 55,000; 60,000; 65,000; 70,000; 75,000; 80,000; 85,000; 90,000; 95,000; or 100,000 kDa.

[0142] As noted above, the polyethylene glycol may have a branched structure. Branched polyethylene glycols are described, for example, in U.S. Pat. No. 5,643,575; Morpurgo et al., Appl. Biochem. Biotechnol. 56:59-72 (1996); Vorobjev et al., Nucleosides Nucleotides 18:2745-2750 (1999); and Caliceti et al., Bioconjug. Chem. 10:638-646 (1999), the disclosures of each of which are incorporated herein by reference.

[0143] The polyethylene glycol molecules (or other chemical moieties) should be attached to the protein with consideration of effects on functional or antigenic domains of the protein. There are a number of attachment methods available to those skilled in the art, e.g., EP 0 401 384, herein incorporated by reference (coupling PEG to G-CSF), see also Malik et al., Exp. Hematol. 20:1028-1035 (1992) (reporting pegylation of GM-CSF using tresyl chloride). For example, polyethylene glycol may be covalently bound through amino acid residues via a reactive group, such as, a free amino or carboxyl group. Reactive groups are those to which an activated polyethylene glycol molecule may be bound. The amino acid residues having a free amino group may include lysine residues and the N-terminal amino acid residues; those having a free carboxyl group may include aspartic acid residues glutamic acid residues and the C-terminal amino acid residue. Sulfhydryl groups may also be used as a reactive group for attaching the polyethylene glycol molecules. Preferred for therapeutic purposes is attachment at an amino group, such as attachment at the N-terminus or lysine group.

[0144] As suggested above, polyethylene glycol may be attached to proteins via linkage to any of a number of amino acid residues. For example, polyethylene glycol can be linked to a proteins via covalent bonds to lysine, histidine, aspartic acid, glutamic acid, or cysteine residues. One or more reaction chemistries may be employed to attach polyethylene glycol to specific amino acid residues (e.g., lysine, histidine, aspartic acid, glutamic acid, or cysteine) of the protein or to more than one type of amino acid residue (e.g., lysine, histidine, aspartic acid, glutamic acid, cysteine and combinations thereof) of the protein.

[0145] One may specifically desire proteins chemically modified at the N-terminus. Using polyethylene glycol as an illustration of the present composition, one may select from a variety of polyethylene glycol molecules (by molecular weight, branching, etc.), the proportion of polyethylene glycol molecules to protein (polypeptide) molecules in the reaction mix, the type of pegylation reaction to be performed, and the method of obtaining the selected N-terminally pegylated protein. The method of obtaining the N-terminally pegylated preparation (i.e., separating this moiety from other monopegylated moieties if necessary) may be by purification of the N-terminally pegylated material from a population of pegylated protein molecules. Selective proteins chemically modified at the N-terminus modification may be accomplished by reductive alkylation which exploits differential reactivity of different types of primary amino groups (lysine versus the N-terminal) available for derivatization in a particular protein. Under the appropriate reaction conditions, substantially selective derivatization of the protein at the N-terminus with a carbonyl group containing polymer is achieved.

[0146] As indicated above, pegylation of the proteins of the invention may be accomplished by any number of means. For example, polyethylene glycol may be attached to the protein either directly or by an intervening linker. Linkerless systems for attaching polyethylene glycol to proteins are described in Delgado et al., Crit. Rev. Thera. Drug Carrier Sys. 9:249-304 (1992); Francis et al., Intern. J. of Hematol. 68:1-18 (1998); U.S. Pat. No. 4,002,531; U.S. Pat. No. 5,349,052; WO 95/06058; and WO 98/32466, the disclosures of each of which are incorporated herein by reference.

[0147] One system for attaching polyethylene glycol directly to amino acid residues of proteins without an intervening linker employs tresylated MPEG, which is produced by the modification of monmethoxy polyethylene glycol (MPEG) using tresylchloride (ClSO₂CH₂CF₃). Upon reaction of protein with tresylated MPEG, polyethylene glycol is directly attached to amine groups of the protein. Thus, the invention includes protein-polyethylene glycol conjugates produced by reacting proteins of the invention with a polyethylene glycol molecule having a 2,2,2-trifluoreothane sulphonyl group.

[0148] Polyethylene glycol can also be attached to proteins using a number of different intervening linkers. For example, U.S. Pat. No. 5,612,460, the entire disclosure of which is incorporated herein by reference, discloses urethane linkers for connecting polyethylene glycol to proteins. Protein-polyethylene glycol conjugates wherein the polyethylene glycol is attached to the protein by a linker can also be produced by reaction of proteins with compounds such as MPEG-succinimidylsuccinate, MPEG activated with 1,1′-carbonyldiimidazole, MPEG-2,4,5-trichloropenylcarbonate, MPEG-p-nitrophenolcarbonate, and various MPEG-succinate derivatives. A number additional polyethylene glycol derivatives and reaction chemistries for attaching polyethylene glycol to proteins are described in WO 98132466, the entire disclosure of which is incorporated herein by reference. Pegylated protein products produced using the reaction chemistries set out herein are included within the scope of the invention.

[0149] The number of polyethylene glycol moieties attached to each protein of the invention (i.e., the degree of substitution) may also vary. For example, the pegylated proteins of the invention may be linked, on average, to 1, 2, 3, 4, 5, 6, 7, 8, 9, 10, 12, 15, 17, 20, or more polyethylene glycol molecules. Similarly, the average degree of substitution within ranges such as 1-3, 24, 3-5, 4-6, 5-7, 6-8, 7-9, 8-10, 9-11, 10-12, 11-13, 12-14, 13-15, 14-16, 15-17, 16-18, 17-19, or 18-20 polyethylene glycol moieties per protein molecule. Methods for determining the degree of substitution are discussed, for example, in Delgado et al., Crit. Rev. Thera. Drug Carrier Sys. 9:249-304 (1992).

[0150] The cancer antigen polypeptides of the invention may be in monomers or multimers (i.e., dimers, trimers, tetramers and higher multimers). Accordingly, the present invention relates to monomers and multimers of the polypeptides of the invention, their preparation, and compositions (preferably, Therapeutics) containing them. In specific embodiments, the polypeptides of the invention are monomers, dimers, trimers or tetramers. In additional embodiments, the multimers of the invention are at least dimers, at least trimers, or at least tetramers.

[0151] Multimers encompassed by the invention may be homomers or heteromers. As used herein, the term homomer, refers to a multimer containing only polypeptides corresponding to the amino acid sequence of SEQ ID NO:Y or an amino acid sequence encoded by SEQ ID NO:X, and/or an amino acid sequence encoded by the cDNA in a related cDNA clone contained in a deposited library (including fragments, variants, splice variants, and fusion proteins, corresponding to any one of these as described herein). These homomers may contain polypeptides having identical or different amino acid sequences. In a specific embodiment, a homomer of the invention is a multimer containing only polypeptides having an identical amino acid sequence. In another specific embodiment, a homomer of the invention is a multimer containing polypeptides having different amino acid sequences. In specific embodiments, the multimer of the invention is a homodimer (e.g., containing polypeptides having identical or different amino acid sequences) or a homotrimer (e.g., containing polypeptides having identical and/or different amino acid sequences). In additional embodiments, the homomeric multimer of the invention is at least a homodimer, at least a homotrimer, or at least a homotetramer.

[0152] As used herein, the term heteromer refers to a multimer containing one or more heterologous polypeptides (i.e., polypeptides of different proteins) in addition to the polypeptides of the invention. In a specific embodiment, the multimer of the invention is a heterodimer, a heterotrimer, or a heterotetramer. In additional embodiments, the heteromeric multimer of the invention is at least a heterodimer, at least a heterotrimer, or at least a heterotetramer.

[0153] Multimers of the invention may be the result of hydrophobic, hydrophilic, ionic and/or covalent associations and/or may be indirectly linked, by for example, liposome formation. Thus, in one embodiment, multimers of the invention, such as, for example, homodimers or homotrimers, are formed when polypeptides of the invention contact one another in solution. In another embodiment, heteromultimers of the invention, such as, for example, heterotrimers or heterotetramers, are formed when polypeptides of the invention contact antibodies to the polypeptides of the invention (including antibodies to the heterologous polypeptide sequence in a fusion protein of the invention) in solution. In other embodiments, multimers of the invention are formed by covalent associations with and/or between the polypeptides of the invention. Such covalent associations may involve one or more amino acid residues contained in the polypeptide sequence (e.g., that recited in SEQ ID NO:Y, or contained in a polypeptide encoded by SEQ ID NO:X, and/or by the cDNA in the related cDNA clone contained in a deposited library). In one instance, the covalent associations are cross-linking between cysteine residues located within the polypeptide sequences which interact in the native (i.e., naturally occurring) polypeptide. In another instance, the covalent associations are the consequence of chemical or recombinant manipulation. Alternatively, such covalent associations may involve one or more amino acid residues contained in the heterologous polypeptide sequence in a fusion protein. In one example, covalent associations are between the heterologous sequence contained in a fusion protein of the invention (see, e.g., U.S. Pat. No. 5,478,925). In a specific example, the covalent associations are between the heterologous sequence contained in a Fc fusion protein of the invention (as described herein). In another specific example, covalent associations of fusion proteins of the invention are between heterologous polypeptide sequence from another protein that is capable of forming covalently associated multimers, such as for example, oseteoprotegerin (see, e.g., International Publication NO: WO 98/49305, the contents of which are herein incorporated by reference in its entirety). In another embodiment, two or more polypeptides of the invention are joined through peptide linkers. Examples include those peptide linkers described in U.S. Pat. No. 5,073,627 (hereby incorporated by reference). Proteins comprising multiple polypeptides of the invention separated by peptide linkers may be produced using conventional recombinant DNA technology.

[0154] Another method for preparing multimer polypeptides of the invention involves use of polypeptides of the invention fused to a leucine zipper or isoleucine zipper polypeptide sequence. Leucine zipper and isoleucine zipper domains are polypeptides that promote multimerization of the proteins in which they are found. Leucine zippers were originally identified in several DNA-binding proteins (Landschulz et al., Science 240:1759, (1988)), and have since been found in a variety of different proteins. Among the known leucine zippers are naturally occurring peptides and derivatives thereof that dimerize or trimerize. Examples of leucine zipper domains suitable for producing soluble multimeric proteins of the invention are those described in PCT application WO 94/10308, hereby incorporated by reference. Recombinant fusion proteins comprising a polypeptide of the invention fused to a polypeptide sequence that dimerizes or trimerizes in solution are expressed in suitable host cells, and the resulting soluble multimeric fusion protein is recovered from the culture supernatant using techniques known in the art.

[0155] Trimeric polypeptides of the invention may offer the advantage of enhanced biological activity. Preferred leucine zipper moieties and isoleucine moieties are those that preferentially form trimers. One example is a leucine zipper derived from lung surfactant protein D (SPD), as described in Hoppe et al. (FEBS Letters 344:191, (1994)) and in U.S. patent application Ser. No. 08/446,922, hereby incorporated by reference. Other peptides derived from naturally occurring trimeric proteins may be employed in preparing trimeric polypeptides of the invention.

[0156] In another example, proteins of the invention are associated by interactions between Flag® polypeptide sequence contained in fusion proteins of the invention containing Flag® polypeptide seuqence. In a further embodiment, associations proteins of the invention are associated by interactions between heterologous polypeptide sequence contained in Flag® fusion proteins of the invention and anti-Flag® antibody.

[0157] The multimers of the invention may be generated using chemical techniques known in the art. For example, polypeptides desired to be contained in the multimers of the invention may be chemically cross-linked using linker molecules and linker molecule length optimization techniques known in the art (see, e.g., U.S. Pat. No. 5,478,925, which is herein incorporated by reference in its entirety). Additionally, multimers of the invention may be generated using techniques known in the art to form one or more inter-molecule cross-links between the cysteine residues located within the sequence of the polypeptides desired to be contained in the multimer (see, e.g., U.S. Pat. No. 5,478,925, which is herein incorporated by reference in its entirety). Further, polypeptides of the invention may be routinely modified by the addition of cysteine or biotin to the C-terminus or N-terminus of the polypeptide and techniques known in the art may be applied to generate multimers containing one or more of these modified polypeptides (see, e.g., U.S. Pat. No. 5,478,925, which is herein incorporated by reference in its entirety). Additionally, techniques known in the art may be applied to generate liposomes containing the polypeptide components desired to be contained in the multimer of the invention (see, e.g., U.S. Pat. No. 5,478,925, which is herein incorporated by reference in its entirety).

[0158] Alternatively, multimers of the invention may be generated using genetic engineering techniques known in the art. In one embodiment, polypeptides contained in multimers of the invention are produced recombinantly using fusion protein technology described herein or otherwise known in the art (see, e.g., U.S. Pat. No. 5,478,925, which is herein incorporated by reference in its entirety). In a specific embodiment, polynucleotides coding for a homodimer of the invention are generated by ligating a polynucleotide sequence encoding a polypeptide of the invention to a sequence encoding a linker polypeptide and then further to a synthetic polynucleotide encoding the translated product of the polypeptide in the reverse orientation from the original C-terminus to the N-terminus (lacking the leader sequence) (see, e.g., U.S. Pat. No. 5,478,925, which is herein incorporated by reference in its entirety). In another embodiment, recombinant techniques described herein or otherwise known in the art are applied to generate recombinant polypeptides of the invention which contain a transmembrane domain (or hyrophobic or signal peptide) and which can be incorporated by membrane reconstitution techniques into liposomes (see, e.g., U.S. Pat. No. 5,478,925, which is herein incorporated by reference in its entirety).

[0159] Antibodies

[0160] Further polypeptides of the invention relate to antibodies and T-cell antigen receptors (TCR) which immunospecifically bind a polypeptide, polypeptide fragment, or variant of SEQ ID NO:Y, and/or an epitope, of the present invention (as determined by immunoassays well known in the art for assaying specific antibody-antigen binding). Antibodies of the invention include, but are not limited to, polyclonal, monoclonal, multispecific, human, humanized or chimeric antibodies, single chain antibodies, Fab fragments, F(ab′) fragments, fragments produced by a Fab expression library, anti-idiotypic (anti-Id) antibodies (including, e.g., anti-Id antibodies to antibodies of the invention), and epitope-binding fragments of any of the above. The term “antibody,” as used herein, refers to immunoglobulin molecules and immunologically active portions of immunoglobulin molecules, i.e., molecules that contain an antigen binding site that immunospecifically binds an antigen. The immunoglobulin molecules of the invention can be of any type (e.g., IgG, IgE, IgM, IgD, IgA and IgY), class (e.g., IgGl, IgG2, IgG3, IgG4, IgA1 and IgA2) or subclass of immunoglobulin molecule.

[0161] Most preferably the antibodies are human antigen-binding antibody fragments of the present invention and include, but are not limited to, Fab, Fab′ and F(ab′)2, Fd, single-chain Fvs (scFv), single-chain antibodies, disulfide-linked Fvs (sdFv) and fragments comprising either a VL or VH domain. Antigen-binding antibody fragments, including single-chain antibodies, may comprise the variable region(s) alone or in combination with the entirety or a portion of the following: hinge region, CHI, CH2, and CH3 domains. Also included in the invention are antigen-binding fragments also comprising any combination of variable region(s) with a hinge region, CH1, CH2, and CH3 domains. The antibodies of the invention may be from any animal origin including birds and mammals. Preferably, the antibodies are human, murine (e.g., mouse and rat), donkey, ship rabbit, goat, guinea pig, camel, horse, or chicken. As used herein, “human” antibodies include antibodies having the amino acid sequence of a human immunoglobulin and include antibodies isolated from human immunoglobulin libraries or from animals transgenic for one or more human immunoglobulin and that do not express endogenous immunoglobulins, as described infra and, for example in, U.S. Pat. No. 5,939,598 by Kucherlapati et al.

[0162] The antibodies of the present invention may be monospecific, bispecific, trispecific or of greater multispecificity. Multispecific antibodies may be specific for different epitopes of a polypeptide of the present invention or may be specific for both a polypeptide of the present invention as well as for a heterologous epitope, such as a heterologous polypeptide or solid support material. See, e.g., PCT publications WO 93/17715; WO 92/08802; WO 91/00360; WO 92/05793; Tutt, et al., J. Immunol. 147:60-69 (1991); U.S. Pat. Nos. 4,474,893; 4,714,681; 4,925,648; 5,573,920; 5,601,819; Kostelny et al., J. Immunol. 148:1547-1553 (1992).

[0163] Antibodies of the present invention may be described or specified in terms of the epitope(s) or portion(s) of a polypeptide of the present invention which they recognize or specifically bind. The epitope(s) or polypeptide portion(s) may be specified as described herein, e.g., by N-terinal and C-terrninal positions, or by size in contiguous amino acid residues. Antibodies which specifically bind any epitope or polypeptide of the present invention may also be excluded. Therefore, the present invention includes antibodies that specifically bind polypeptides of the present invention, and allows for the exclusion of the same.

[0164] Antibodies of the present invention may also be described or specified in terms of their cross-reactivity. Antibodies that do not bind any other analog, ortholog, or homolog of a polypeptide of the present invention are included. Antibodies that bind polypeptides with at least 95%, at least 90%, at least 85%, at least 80%, at least 75%, at least 70%, at least 65%, at least 60%, at least 55%, and at least 50% identity (as calculated using methods known in the art and described herein) to a polypeptide of the present invention are also included in the present invention. In specific embodiments, antibodies of the present invention cross-react with murine, rat and/or rabbit homologs of human proteins and the corresponding epitopes thereof. Antibodies that do not bind polypeptides with less than 95%, less than 90%, less than 85%, less than 80%, less than 75%, less than 70%, less than 65%, less than 60%, less than 55%, and less than 50% identity (as calculated using methods known in the art and described herein) to a polypeptide of the present invention are also included in the present invention. In a specific embodiment, the above-described cross-reactivity is with respect to any single specific antigenic or immunogenic polypeptide, or combination(s) of 2, 3, 4, 5, or more of the specific antigenic and/or immunogenic polypeptides disclosed herein. Further included in the present invention are antibodies which bind polypeptides encoded by polynucleotides which hybridize to a polynucleotide of the present invention under stringent hybridization conditions (as described herein). Antibodies of the present invention may also be described or specified in terms of their binding affinity to a polypeptide of the invention. Preferred binding affinities include those with a dissociation constant or Kd less than 5×10⁻² M, 10⁻² M, 5×10⁻³ M, 10⁻³ M, 5×10⁻⁴ M, 10⁻⁴ M, 5×10⁻⁵ M, 10⁻⁵ M, 5×10⁻⁶ M, 10⁻⁶M, 5×10⁻⁷ M, 10⁻⁷M, 5×10⁻⁸ M, 10⁻⁸ M, 5×10⁻⁹ M, 10⁻⁹M, 5×10⁻¹⁰ M, 10⁻¹⁰ M, 5×10⁻¹¹ M, 10⁻¹¹ M, 5×10⁻¹² M, ¹⁰⁻¹² M, 5×10⁻¹³ M, 10⁻¹³ M, 5×10⁻¹⁴ M, 10⁻¹⁴ M, 5×10⁻¹⁵ M, or ¹⁰⁻¹⁵ M.

[0165] The invention also provides antibodies that competitively inhibit binding of an antibody to an epitope of the invention as determined by any method known in the art for determining competitive binding, for example, the immunoassays described herein. In preferred embodiments, the antibody competitively inhibits binding to the epitope by at least 95%, at least 90%, at least 85%, at least 80%, at least 75%, at least 70%, at least 60%, or at least 50%.

[0166] Antibodies of the present invention may act as agonists or antagonists of the polypeptides of the present invention. For example, the present invention includes antibodies which disrupt the receptor/ligand interactions with the polypeptides of the invention either partially or fully. Preferrably, antibodies of the present invention bind an antigenic epitope disclosed herein, or a portion thereof. The invention features both receptor-specific antibodies and ligand-specific antibodies. The invention also features receptor-specific antibodies which do not prevent ligand binding but prevent receptor activation. Receptor activation (i.e., signaling) may be determined by techniques described herein or otherwise known in the art. For example, receptor activation can be determined by detecting the phosphorylation (e.g., tyrosine or serine/threonine) of the receptor or its substrate by immunoprecipitation followed by western blot analysis (for example, as described supra). In specific embodiments, antibodies are provided that inhibit ligand activity or receptor activity by at least 95%, at least 90%, at least 85%, at least 80%, at least 75%, at least 70%, at least 60%, or at least 50% of the activity in absence of the antibody.

[0167] The invention also features receptor-specific antibodies which both prevent ligand binding and receptor activation as well as antibodies that recognize the receptor-ligand complex, and, preferably, do not specifically recognize the unbound receptor or the unbound ligand. Likewise, included in the invention are neutralizing antibodies which bind the ligand and prevent binding of the ligand to the receptor, as well as antibodies which bind the ligand, thereby preventing receptor activation, but do not prevent the ligand from binding the receptor. Further included in the invention are antibodies which activate the receptor. These antibodies may act as receptor agonists, i.e., potentiate or activate either all or a subset of the biological activities of the ligand-mediated receptor activation, for example, by inducing dimerization of the receptor. The antibodies may be specified as agonists, antagonists or inverse agonists for biological activities comprising the specific biological activities of the peptides of the invention disclosed herein. The above antibody agonists can be made using methods known in the art. See, e.g., PCT publication WO 96/40281; U.S. Pat. No. 5,811,097; Deng et al., Blood 92(6):1981-1988 (1998); Chen et al., Cancer Res. 58(16):3668-3678 (1998); Harrop et al., J. Immunol. 161(4):1786-1794 (1998); Zhu et al., Cancer Res. 58(15):3209-3214 (1998); Yoon et al., J. Immunol. 160(7):3170-3179 (1998); Prat et al., J. Cell. Sci. 111(Pt2):237-247 (1998); Pitard et al., J. hnmunol. Methods 205(2):177-190 (1997); Liautard et al., Cytokine 9(4):233-241 (1997); Carlson et al., J. Biol. Chem. 272(17):11295-11301 (1997); Taryman et al., Neuron 14(4):755-762 (1995); Muller et al., Structure 6(9):1153-1167 (1998); Bartunek et al., Cytokine 8(1):14-20 (1996) (which are all incorporated by reference herein in their entireties).

[0168] Antibodies of the present invention may be used, for example, but not limited to, to purify, detect, and target the polypeptides of the present invention, including both in vitro and in vivo diagnostic and therapeutic methods. For example, the antibodies have use in immunoassays for qualitatively and quantitatively measuring levels of the polypeptides of the present invention in biological samples. See, e.g., Harlow et al., Antibodies: A Laboratory Manual, (Cold Spring Harbor Laboratory Press, 2nd ed. 1988) (incorporated by reference herein in its entirety).

[0169] As discussed in more detail below, the antibodies of the present invention may be used either alone or in combination with other compositions. The antibodies may further be recombinantly fused to a heterologous polypeptide at the N- or C-terminus or chemically conjugated (including covalently and non-covalently conjugations) to polypeptides or other compositions. For example, antibodies of the present invention may be recombinantly fused or conjugated to molecules useful as labels in detection assays and effector molecules such as heterologous polypeptides, drugs, radionuclides, or toxins. See, e.g., PCT publications WO 92/08495; WO 91/14438; WO 89/12624; U.S. Pat. No. 5,314,995; and EP 396,387.

[0170] The antibodies of the invention include derivatives that are modified, i.e, by the covalent attachment of any type of molecule to the antibody such that covalent attachment does not prevent the antibody from generating an anti-idiotypic response. For example, but not by way of limitation, the antibody derivatives include antibodies that have been modified, e.g., by glycosylation, acetylation, pegylation, phosphylation, amidation, derivatization by known protecting/blocking groups, proteolytic cleavage, linkage to a cellular ligand or other protein, etc. Any of numerous chemical modifications may be carried out by known techniques, including, but not limited to specific chemical cleavage, acetylation, formylation, metabolic synthesis of tunicamycin, etc. Additionally, the derivative may contain one or more non-classical amino acids.

[0171] The antibodies of the present invention may be generated by any suitable method known in the art. Polyclonal antibodies to an antigen-of- interest can be produced by various procedures well known in the art. For example, a polypeptide of the invention can be administered to various host animals including, but not limited to, rabbits, mice, rats, etc. to induce the production of sera containing polyclonal antibodies specific for the antigen. Various adjuvants may be used to increase the immunological response, depending on the host species, and include but are not limited to, Freund's (complete and incomplete), mineral gels such as aluminum hydroxide, surface active substances such as lysolecithin, pluronic polyols, polyanions, peptides, oil emulsions, keyhole limpet hemocyanins, dinitrophenol, and potentially useful human adjuvants such as BCG (bacille Calmette-Guerin) and corynebacterium parvum. Such adjuvants are also well known in the art.

[0172] Monoclonal antibodies can be prepared using a wide variety of techniques known in the art including the use of hybridoma, recombinant, and phage display technologies, or a combination thereof. For example, monoclonal antibodies can be produced using hybridoma techniques including those known in the art and taught, for example, in Harlow et al., Antibodies: A Laboratory Manual, (Cold Spring Harbor Laboratory Press, 2nd ed. 1988); Hammerling, et al., in: Monoclonal Antibodies and T-Cell Hybridomas 563-681 (Elsevier, N.Y., 1981) (said references incorporated by reference in their entireties). The term “monoclonal antibody” as used herein is not limited to antibodies produced through hybridoma technology. The term “monoclonal antibody” refers to an antibody that is derived from a single clone, including any eukaryotic, prokaryotic, or phage clone, and not the method by which it is produced.

[0173] Methods for producing and screening for specific antibodies using hybridoma technology are routine and well known in the art and are discussed in detail in the Examples. In a non-limiting example, mice can be immunized with a polypeptide of the invention or a cell expressing such peptide. Once an immune response is detected, e.g., antibodies specific for the antigen are detected in the mouse serum, the mouse spleen is harvested and splenocytes isolated. The splenocytes are then fused by well known techniques to any suitable myeloma cells, for example cells from cell line SP20 available from the ATCC. Hybridomas are selected and cloned by limited dilution. The hybridoma clones are then assayed by methods known in the art for cells that secrete antibodies capable of binding a polypeptide of the invention. Ascites fluid, which generally contains high levels of antibodies, can be generated by immunizing mice with positive hybridoma clones.

[0174] Accordingly, the present invention provides methods of generating monoclonal antibodies as well as antibodies produced by the method comprising culturing a hybridoma cell secreting an antibody of the invention wherein, preferably, the hybridoma is generated by fusing splenocytes isolated from a mouse immunized with an antigen of the invention with myeloma cells and then screening the hybridomas resulting from the fusion for hybridoma clones that secrete an antibody able to bind a polypeptide of the invention.

[0175] Antibody fragments which recognize specific epitopes may be generated by known techniques. For example, Fab and F(ab′)2 fragments of the invention may be produced by proteolytic cleavage of immunoglobulin molecules, using enzymes such as papain (to produce Fab fragments) or pepsin (to produce F(ab′)2 fragments). F(ab′)2 fragments contain the variable region, the light chain constant region and the CH1 domain of the heavy chain.

[0176] For example, the antibodies of the present invention can also be generated using various phage display methods known in the art. In phage display methods, functional antibody domains are displayed on the surface of phage particles which carry the polynucleotide sequences encoding them. In a particular embodiment, such phage can be utilized to display antigen binding domains expressed from a repertoire or combinatorial antibody library (e.g., human or murine). Phage expressing an antigen binding domain that binds the antigen of interest can be selected or identified with antigen, e.g., using labeled antigen or antigen bound or captured to a solid surface or bead. Phage used in these methods are typically filamentous phage including fd and M13 binding domains expressed from phage with Fab, Fv or disulfide stabilized Fv antibody domains recombinantly fused to either the phage gene III or gene VIII protein. Examples of phage display methods that can be used to make the antibodies of the present invention include those disclosed in Brinkman et al., J. Immunol. Methods 182:41-50 (1995); Ames et al., J. Immunol. Methods 184:177-186 (1995); Kettleborough et al., Eur. J. Immunol. 24:952-958 (1994); Persic et al., Gene 187 9-18 (1997); Burton et al., Advances in Immunology 57:191-280 (1994); PCT application No. PCT/GB91/01134; PCT publications WO 90/02809; WO 91/10737; WO 92/01047; WO 92/18619; WO 93/11236; WO 95/15982; WO 95/20401; and U.S. Pat. Nos. 5,698,426; 5,223,409; 5,403,484; 5,580,717; 5,427,908; 5,750,753; 5,821,047; 5,571,698; 5,427,908; 5,516,637; 5,780,225; 5,658,727; 5,733,743 and 5,969,108; each of which is incorporated herein by reference in its entirety.

[0177] As described in the above references, after phage selection, the antibody coding regions from the phage can be isolated and used to generate whole antibodies, including human antibodies, or any other desired antigen binding fragment, and expressed in any desired host, including mammalian cells, insect cells, plant cells, yeast, and bacteria, e.g., as described in detail below. For example, techniques to recombinantly produce Fab, Fab′ and F(ab′)2 fragments can also be employed using methods known in the art such as those disclosed in PCT publication WO 92/22324; Mullinax et al., BioTechniques 12(6):864-869 (1992); and Sawai et al., AJRI 34:26-34 (1995); and Better et al., Science 240:1041-1043 (1988) (said references incorporated by reference in their entireties).

[0178] Examples of techniques which can be used to produce single-chain Fvs and antibodies include those described in U.S. Pat. Nos. 4,946,778 and 5,258,498; Huston et al., Methods in Enzymology 203:46-88 (1991); Shu et al., PNAS 90:7995-7999 (1993); and Skerra et al., Science 240:1038-1040 (1988). For some uses, including in vivo use of antibodies in humans and in vitro detection assays, it may be preferable to use chimeric, humanized, or human antibodies. A chimeric antibody is a molecule in which different portions of the antibody are derived from different animal species, such as antibodies having a variable region derived from a murine monoclonal antibody and a human immunoglobulin constant region. Methods for producing chimeric antibodies are known in the art. See e.g., Morrison, Science 229:1202 (1985); Oi et al., BioTechniques 4:214 (1986); Gillies et al., (1989) J. Immunol. Methods 125:191-202; U.S. Pat. Nos. 5,807,715; 4,816,567; and 4,816397, which are incorporated herein by reference in their entirety. Humanized antibodies are antibody molecules from non-human species antibody that binds the desired antigen having one or more complementarity determining regions (CDRs) from the non-human species and a framework regions from a human immunoglobulin molecule. Often, framework residues in the human framework regions will be substituted with the corresponding residue from the CDR donor antibody to alter, preferably improve, antigen binding. These framework substitutions are identified by methods well known in the art, e.g., by modeling of the interactions of the CDR and framework residues to identify framework residues important for antigen binding and sequence comparison to identify unusual framework residues at particular positions. (See, e.g., Queen et al., U.S. Pat. No. 5,585,089; Riechmann et al., Nature 332:323 (1988), which are incorporated herein by reference in their entireties.) Antibodies can be humanized using a variety of techniques known in the art including, for example, CDR-grafting (EP 239,400; PCT publication WO 91/09967; U.S. Pat. Nos. 5,225,539; 5,530,101; and 5,585,089), veneering or resurfacing (EP 592,106; EP 519,596; Padlan, Molecular Immunology 28(4/5):489-498 (1991); Studnicka et al., Protein Engineering 7(6):805-814 (1994); Roguska. et al., PNAS 91:969-973 (1994)), and chain shuffling (U.S. Pat. No. 5,565,332).

[0179] Completely human antibodies are particularly desirable for therapeutic treatment of human patients. Human antibodies can be made by a variety of methods known in the art including phage display methods described above using antibody libraries derived from human immunoglobulin sequences. See also, U.S. Pat. Nos. 4,444,887 and 4,716,111; and PCT publications WO 98/46645, WO 98/50433, WO 98/24893, WO 98/16654, WO 96/34096, WO 96/33735, and WO 91/10741; each of which is incorporated herein by reference in its entirety.

[0180] Human antibodies can also be produced using transgenic mice which are incapable of expressing functional endogenous immunoglobulins, but which can express human immunoglobulin genes. For example, the human heavy and light chain immunoglobulin gene complexes may be introduced randomly or by homologous recombination into mouse embryonic stem cells. Alternatively, the human variable region, constant region, and diversity region may be introduced into mouse embryonic stem cells in addition to the human heavy and light chain genes. The mouse heavy and light chain immunoglobulin genes may be rendered non-functional separately or simultaneously with the introduction of human immunoglobulin loci by homologous recombination. In particular, homozygous deletion of the JH region prevents endogenous antibody production. The modified embryonic stem cells are expanded and microinjected into blastocysts to produce chimeric mice. The chimeric mice are then bred to produce homozygous offspring which express human antibodies. The transgenic mice are immunized in the normal fashion with a selected antigen, e.g., all or a portion of a polypeptide of the invention. Monoclonal antibodies directed against the antigen can be obtained from the immunized, transgenic mice using conventional hybridoma technology. The human immunoglobulin transgenes harbored by the transgenic mice rearrange during B cell differentiation, and subsequently undergo class switching and somatic mutation. Thus, using such a technique, it is possible to produce therapeutically useful IgG, IgA, IgM and IgE antibodies. For an overview of this technology for producing human antibodies, see Lonberg and Huszar, Int. Rev. Immunol. 13:65-93 (1995). For a detailed discussion of this technology for producing human antibodies and human monoclonal antibodies and protocols for producing such antibodies, see, e.g., PCT publications WO 98/24893; WO 92/01047; WO 96/34096; WO 96/33735; European Patent No. 0 598 877; U.S. Pat. Nos. 5,413,923; 5,625,126; 5,633,425; 5,569,825; 5,661,016; 5,545,806; 5,814,318; 5,885,793; 5,916,771; and 5,939,598, which are incorporated by reference herein in their entirety. In addition, companies such as Abgenix, Inc. (Freemont, Calif.) and Genpharm (San Jose, Calif.) can be engaged to provide human antibodies directed against a selected antigen using technology similar to that described above.

[0181] Completely human antibodies which recognize a selected epitope can be generated using a technique referred to as “guided selection.” In this approach a selected non-human monoclonal antibody, e.g., a mouse antibody, is used to guide the selection of a completely human antibody recognizing the same epitope. (Jespers et al., Bio/technology 12:899-903 (1988)).

[0182] Further, antibodies to the polypeptides of the invention can, in turn, be utilized to generate anti-idiotype antibodies that “mimic” polypeptides of the invention using techniques well known to those skilled in the art. (See, e.g., Greenspan & Bona, FASEB J. 7(5):437-444; (1989) and Nissinoff, J. Immunol. 147(8):2429-2438 (1991)). For example, antibodies which bind to and competitively inhibit polypeptide multimerization and/or binding of a polypeptide of the invention to a ligand can be used to generate anti-idiotypes that “mimic” the polypeptide multimerization and/or binding domain and, as a consequence, bind to and neutralize polypeptide and/or its ligand. Such neutralizing anti-idiotypes or Fab fragments of such anti-idiotypes can be used in therapeutic regimens to neutralize polypeptide ligand. For example, such anti-idiotypic antibodies can be used to bind a polypeptide of the invention and/or to bind its ligands/receptors, and thereby block its biological activity.

[0183] Polynucleotides Encoding Antibodies

[0184] The invention further provides polynucleotides comprising a nucleotide sequence encoding an antibody of the invention and fragments thereof. The invention also encompasses polynucleotides that hybridize under stringent or alternatively, under lower stringency hybridization conditions, e.g., as defined supra, to polynucleotides that encode an antibody, preferably, that specifically binds to a polypeptide of the invention, preferably, an antibody that binds to a polypeptide having the amino acid sequence of SEQ ID NO:Y.

[0185] The polynucleotides may be obtained, and the nucleotide sequence of the polynucleotides determined, by any method known in the art. For example, if the nucleotide sequence of the antibody is known, a polynucleotide encoding the antibody may be assembled from chemically synthesized oligonucleotides (e.g., as described in Kutmeier et al., BioTechniques 17:242 (1994)), which, briefly, involves the synthesis of overlapping oligonucleotides containing portions of the sequence encoding the antibody, annealing and ligating of those oligonucleotides, and then amplification of the ligated oligonucleotides by PCR.

[0186] Alternatively, a polynucleotide encoding an antibody may be generated from nucleic acid from a suitable source. If a clone containing a nucleic acid encoding a particular antibody is not available, but the sequence of the antibody molecule is known, a nucleic acid encoding the immunoglobulin may be chemically synthesized or obtained from a suitable source (e.g., an antibody cDNA library, or a cDNA library generated from, or nucleic acid, preferably poly A+RNA, isolated from, any tissue or cells expressing the antibody, such as hybridoma cells selected to express an antibody of the invention) by PCR amplification using synthetic primers hybridizable to the 3′ and 5′ ends of the sequence or by cloning using an oligonucleotide probe specific for the particular gene sequence to identify, e.g., a cDNA clone from a cDNA library that encodes the antibody. Amplified nucleic acids generated by PCR may then be cloned into replicable cloning vectors using any method well known in the art.

[0187] Once the nucleotide sequence and corresponding amino acid sequence of the antibody is determined, the nucleotide sequence of the antibody may be manipulated using methods well known in the art for the manipulation of nucleotide sequences, e.g., recombinant DNA techniques, site directed mutagenesis, PCR, etc. (see, for example, the techniques described in Sambrook et al., 1990, Molecular Cloning, A Laboratory Manual, 2d Ed., Cold Spring Harbor Laboratory, Cold Spring Harbor, N.Y. and Ausubel et al., eds., 1998, Current Protocols in Molecular Biology, John Wiley & Sons, NY, which are both incorporated by reference herein in their entireties ), to generate antibodies having a different amino acid sequence, for example to create amino acid substitutions, deletions, and/or insertions.

[0188] In a specific embodiment, the amino acid sequence of the heavy and/or light chain variable domains may be inspected to identify the sequences of the complementarity determining regions (CDRs) by methods that are well know in the art, e.g., by comparison to known amino acid sequences of other heavy and light chain variable regions to determine the regions of sequence hypervariability. Using routine recombinant DNA techniques, one or more of the CDRs may be inserted within framework regions, e.g., into human framework regions to humanize a non-human antibody, as described supra. The framework regions may be naturally occurring or consensus framework regions, and preferably human framework regions (see, e.g., Chothia et al., J. Mol. Biol. 278: 457-479 (1998) for a listing of human framework regions). Preferably, the polynucleotide generated by the combination of the framework regions and CDRs encodes an antibody that specifically binds a polypeptide of the invention. Preferably, as discussed supra, one or more amino acid substitutions may be made within the framework regions, and, preferably, the amino acid substitutions improve binding of the antibody to its antigen. Additionally, such methods may be used to make amino acid substitutions or deletions of one or more variable region cysteine residues participating in an intrachain disulfide bond to generate antibody molecules lacking one or more intrachain disulfide bonds. Other alterations to the polynucleotide are encompassed by the present invention and within the skill of the art.

[0189] In addition, techniques developed for the production of “chimeric antibodies” (Morrison et al., Proc. Natl. Acad. Sci. 81:851-855 (1984); Neuberger et al., Nature 312:604-608 (1984); Takeda et al., Nature 314:452-454 (1985)) by splicing genes from a mouse antibody molecule of appropriate antigen specificity together with genes from a human antibody molecule of appropriate biological activity can be used. As described supra, a chimeric antibody is a molecule in which different portions are derived from different animal species, such as those having a variable region derived from a murine mAb and a human immunoglobulin constant region, e.g., humanized antibodies.

[0190] Alternatively, techniques described for the production of single chain antibodies (U.S. Pat. No. 4,946,778; Bird, Science 242:423-42 (1988); Huston et al., Proc. Natl. Acad. Sci. USA 85:5879-5883 (1988); and Ward et al., Nature 334:544-54 (1989)) can be adapted to produce single chain antibodies. Single chain antibodies are formed by linking the heavy and light chain fragments of the Fv region via an amino acid bridge, resulting in a single chain polypeptide. Techniques for the assembly of functional Fv fragments in E. coli may also be used (Skerra et al., Science 242:1038-1041 (1988)).

[0191] Methods of Producing Antibodies

[0192] The antibodies of the invention can be produced by any method known in the art for the synthesis of antibodies, in particular, by chemical synthesis or preferably, by recombinant expression techniques.

[0193] Recombinant expression of an antibody of the invention, or fragment, derivative or analog thereof, (e.g., a heavy or light chain of an antibody of the invention or a single chain antibody of the invention), requires construction of an expression vector containing a polynucleotide that encodes the antibody. Once a polynucleotide encoding an antibody molecule or a heavy or light chain of an antibody, or portion thereof (preferably containing the heavy or light chain variable domain), of the invention has been obtained, the vector for the production of the antibody molecule may be produced by recombinant DNA technology using techniques well known in the art. Thus, methods for preparing a protein by expressing a polynucleotide containing an antibody encoding nucleotide sequence are described herein. Methods which are well known to those skilled in the art can be used to construct expression vectors containing antibody coding sequences and appropriate transcriptional and translational control signals. These methods include, for example, in vitro recombinant DNA techniques, synthetic techniques, and in vivo genetic recombination. The invention, thus, provides replicable vectors comprising a nucleotide sequence encoding an antibody molecule of the invention, or a heavy or light chain thereof, or a heavy or light chain variable domain, operably linked to a promoter. Such vectors may include the nucleotide sequence encoding the constant region of the antibody molecule (see, e.g., PCT Publication WO 86/05807; PCT Publication WO 89/01036; and U.S. Pat. No. 5,122,464) and the variable domain of the antibody may be cloned into such a vector for expression of the entire heavy or light chain.

[0194] The expression vector is transferred to a host cell by conventional techniques and the transfected cells are then cultured by conventional techniques to produce an antibody of the invention. Thus, the invention includes host cells containing a polynucleotide encoding an antibody of the invention, or a heavy or light chain thereof, or a single chain antibody of the invention, operably linked to a heterologous promoter. In preferred embodiments for the expression of double-chained antibodies, vectors encoding both the heavy and light chains may be co-expressed in the host cell for expression of the entire immunoglobulin molecule, as detailed below.

[0195] A variety of host-expression vector systems may be utilized to express the antibody molecules of the invention. Such host-expression systems represent vehicles by which the coding sequences of interest may be produced and subsequently purified, but also represent cells which may, when transformed or transfected with the appropriate nucleotide coding sequences, express an antibody molecule of the invention in situ. These include but are not limited to microorganisms such as bacteria (e.g., E. coli, B. subtilis) transformed with recombinant bacteriophage DNA, plasmid DNA or cosmid DNA expression vectors containing antibody coding sequences; yeast (e.g., Saccharomyces, Pichia) transformed with recombinant yeast expression vectors containing antibody coding sequences; insect cell systems infected with recombinant virus expression vectors (e.g., baculovirus) containing antibody coding sequences; plant cell systems infected with recombinant virus expression vectors (e.g., cauliflower mosaic virus, CaMV; tobacco mosaic virus, TMV) or transformed with recombinant plasmid expression vectors (e.g., Ti plasmid) containing antibody coding sequences; or mammalian cell systems (e.g., COS, CHO, BIK, 293, 3T3 cells) harboring recombinant expression constructs containing promoters derived from the genome of mammalian cells (e.g., metallothionein promoter) or from mammalian viruses (e.g., the adenovirus late promoter; the vaccinia virus 7.5K promoter). Preferably, bacterial cells such as Escherichia coli, and more preferably, eukaryotic cells, especially for the expression of whole recombinant antibody molecule, are used for the expression of a recombinant antibody molecule. For example, mammalian cells such as Chinese hamster ovary cells (CHO), in conjunction with a vector such as the major intermediate early gene promoter element from human cytomegalovirus is an effective expression system for antibodies (Foecking et al., Gene 45:101 (1986); Cockett et al., Bio/Technology 8:2 (1990)).

[0196] In bacterial systems, a number of expression vectors may be advantageously selected depending upon the use intended for the antibody molecule being expressed. For example, when a large quantity of such a protein is to be produced, for the generation of pharmaceutical compositions of an antibody molecule, vectors which direct the expression of high levels of fusion protein products that are readily purified may be desirable. Such vectors include, but are not limited, to the E. coli expression vector pUR278 (Ruther et al., EMBO J. 2:1791 (1983)), in which the antibody coding sequence may be ligated individually into the vector in frame with the lac Z coding region so that a fusion protein is produced; pIN vectors (Inouye & Inouye, Nucleic Acids Res. 13:3101-3109 (1985); Van Heeke & Schuster, J. Biol. Chem. 24:5503-5509 (1989)); and the like. pGEX vectors may also be used to express foreign polypeptides as fusion proteins with glutathione S-transferase (GST). In general, such fusion proteins are soluble and can easily be purified from lysed cells by adsorption and binding to matrix glutathione-agarose beads followed by elution in the presence of free glutathione. The pGEX vectors are designed to include thrombin or factor Xa protease cleavage sites so that the cloned target gene product can be released from the GST moiety.

[0197] In an insect system, Autographa califomica nuclear polyhedrosis virus (AcNPV) is used as a vector to express foreign genes. The virus grows in Spodoptera frugiperda cells. The antibody coding sequence may be cloned individually into non-essential regions (for example the polyhedrin gene) of the virus and placed under control of an AcNPV promoter (for example the polyhedrin promoter).

[0198] In mammalian host cells, a number of viral-based expression systems may be utilized. In cases where an adenovirus is used as an expression vector, the antibody coding sequence of interest may be ligated to an adenovirus transcription/translation control complex, e.g., the late promoter and tripartite leader sequence. This chimeric gene may then be inserted in the adenovirus genome by in vitro or in vivo recombination. Insertion in a non- essential region of the viral genome (e.g., region E1 or E3) will result in a recombinant virus that is viable and capable of expressing the antibody molecule in infected hosts. (e.g., see Logan & Shenk, Proc. Natl. Acad. Sci. USA 81:355-359 (1984)). Specific initiation signals may also be required for efficient translation of inserted antibody coding sequences. These signals include the ATG initiation codon and adjacent sequences. Furthermore, the initiation codon must be in phase with the reading frame of the desired coding sequence to ensure translation of the entire insert. These exogenous translational control signals and initiation codons can be of a variety of origins, both natural and synthetic. The efficiency of expression may be enhanced by the inclusion of appropriate transcription enhancer elements, transcription terminators, etc. (see Bittner et al., Methods in Enzymol. 153:51-544 (1987)).

[0199] In addition, a host cell strain may be chosen which modulates the expression of the inserted sequences, or modifies and processes the gene product in the specific fashion desired. Such modifications (e.g., glycosylation) and processing (e.g., cleavage) of protein products may be important for the function of the protein. Different host cells have characteristic and specific mechanisms for the post-translational processing and modification of proteins and gene products. Appropriate cell lines or host systems can be chosen to ensure the correct modification and processing of the foreign protein expressed. To this end, eukaryotic host cells which possess the cellular machinery for proper processing of the primary transcript, glycosylation, and phosphorylation of the gene product may be used. Such mammalian host cells include but are not limited to CHO, VERY, BHK, Hela, COS, MDCK, 293, 3T3, W138, and in particular, breast cancer cell lines such as, for example, BT483, Hs578T, HTB2, BT20 and T47D, and normal mammary gland cell line such as, for example, CRL7030 and Hs578Bst.

[0200] For long-term, high-yield production of recombinant proteins, stable expression is preferred. For example, cell lines which stably express the antibody molecule may be engineered. Rather than using expression vectors which contain viral origins of replication, host cells can be transformed with DNA controlled by appropriate expression control elements (e.g., promoter, enhancer, sequences, transcription terminators, polyadenylation sites, etc.), and a selectable marker. Following the introduction of the foreign DNA, engineered cells may be allowed to grow for 1-2 days in an enriched media, and then are switched to a selective media. The selectable marker in the recombinant plasmid confers resistance to the selection and allows cells to stably integrate the plasmid into their chromosomes and grow to form foci which in turn can be cloned and expanded into cell lines. This method may advantageously be used to engineer cell lines which express the antibody molecule. Such engineered cell lines may be particularly useful in screening and evaluation of compounds that interact directly or indirectly with the antibody molecule.

[0201] A number of selection systems may be used, including but not limited to the herpes simplex virus thymidine kinase (Wigler et al., Cell 11:223 (1977)), hypoxanthine-guanine phosphoribosyltransferase (Szybalska & Szybalski, Proc. Natl. Acad. Sci. USA 48:202 (1992)), and adenine phosphoribosyltransferase (Lowy et al., Cell 22:817 (1980)) genes can be employed in tk-, hgprt- or aprt- cells, respectively. Also, antimetabolite resistance can be used as the basis of selection for the following genes: dhfr, which confers resistance to methotrexate (Wigler et al., Natl. Acad. Sci. USA 77:357 (1980); O'Hare et al., Proc. Natl. Acad. Sci. USA 78:1527 (1981)); gpt, which confers resistance to mycophenolic acid (Mulligan & Berg, Proc. Natl. Acad. Sci. USA 78:2072 (1981)); neo, which confers resistance to the aminoglycoside G-418 Clinical Pharmacy 12:488-505; Wu and Wu, Biotherapy 3:87-95 (1991); Tolstoshev, Ann. Rev. Pharmacol. Toxicol. 32:573-596 (1993); Mulligan, Science 260:926-932 (1993); and Morgan and Anderson, Ann. Rev. Biochem. 62:191-217 (1993); May, 1993, TIB TECH 11(5):155-215); and hygro, which confers resistance to hygromycin (Santerre et al., Gene 30:147 (1984)). Methods commonly known in the art of recombinant DNA technology may be routinely applied to select the desired recombinant clone, and such methods are described, for example, in Ausubel et al. (eds.), Current Protocols in Molecular Biology, John Wiley & Sons, NY (1993); Kriegler, Gene Transfer and Expression, A Laboratory Manual, Stockton Press, NY (1990); and in Chapters 12 and 13, Dracopoli et al. (eds), Current Protocols in Human Genetics, John Wiley & Sons, NY (1994); Colberre-Garapin et al., J. Mol. Biol. 150:1 (1981), which are incorporated by reference herein in their entireties.

[0202] The expression levels of an antibody molecule can be increased by vector amplification (for a review, see Bebbington and Hentschel, The use of vectors based on gene amplification for the expression of cloned genes in mammalian cells in DNA cloning, Vol.3. (Academic Press, New York, 1987)). When a marker in the vector system expressing antibody is amplifiable, increase in the level of inhibitor present in culture of host cell will increase the number of copies of the marker gene. Since the amplified region is associated with the antibody gene, production of the antibody will also increase (Crouse et al., Mol. Cell. Biol. 3:257 (1983)).

[0203] The host cell may be co-transfected with two expression vectors of the invention, the first vector encoding a heavy chain derived polypeptide and the second vector encoding a light chain derived polypeptide. The two vectors may contain identical selectable markers which enable equal expression of heavy and light chain polypeptides. Alternatively, a single vector may be used which encodes, and is capable of expressing, both heavy and light chain polypeptides. In such situations, the light chain should be placed before the heavy chain to avoid an excess of toxic free heavy chain (Proudfoot, Nature 322:52 (1986); Kohler, Proc. Natl. Acad. Sci. USA 77:2197 (1980)). The coding sequences for the heavy and light chains may comprise cDNA or genomic DNA.

[0204] Once an antibody molecule of the invention has been produced by an animal, chemically synthesized, or recombinantly expressed, it may be purified by any method known in the art for purification of an immunoglobulin molecule, for example, by chromatography (e.g., ion exchange, affinity, particularly by affinity for the specific antigen after Protein A, and sizing column chromatography), centrifugation, differential solubility, or by any other standard technique for the purification of proteins. In addition, the antibodies of the present invention or fragments thereof can be fused to heterologous polypeptide sequences described herein or otherwise known in the art, to facilitate purification.

[0205] The present invention encompasses antibodies recombinantly fused or chemically conjugated (including both covalently and non-covalently conjugations) to a polypeptide (or portion thereof, preferably at least 10, 20, 30, 40, 50, 60, 70, 80, 90 or 100 amino acids of the polypeptide) of the present invention to generate fusion proteins. The fusion does not necessarily need to be direct, but may occur through linker sequences. The antibodies may be specific for antigens other than polypeptides (or portion thereof, preferably at least 10, 20, 30, 40, 50, 60, 70, 80, 90 or 100 amino acids of the polypeptide) of the present invention. For example, antibodies may be used to target the polypeptides of the present invention to particular cell types, either in vitro or in vivo, by fusing or conjugating the polypeptides of the present invention to antibodies specific for particular cell surface receptors. Antibodies fused or conjugated to the polypeptides of the present invention may also be used in in vitro immunoassays and purification methods using methods known in the art. See e.g., Harbor et al., supra, and PCT publication WO 93/21232; EP 439,095; Naramura et al., Immunol. Lett. 39:91-99 (1994); U.S. Pat. No. 5,474,981; Gillies et al., PNAS 89:1428-1432 (1992); Fell et al., J. Immunol. 146:2446-2452(1991), which are incorporated by reference in their entireties.

[0206] The present invention further includes compositions comprising the polypeptides of the present invention fused or conjugated to antibody domains other than the variable regions. For example, the polypeptides of the present invention may be fused or conjugated to an antibody Fc region, or portion thereof. The antibody portion fused to a polypeptide of the present invention may comprise the constant region, hinge region, CH1 domain, CH2 domain, and CH3 domain or any combination of whole domains or portions thereof. The polypeptides may also be fused or conjugated to the above antibody portions to form multimers. For example, Fc portions fused to the polypeptides of the present invention can form dimers through disulfide bonding between the Fc portions. Higher multimeric forms can be made by fusing the polypeptides to portions of IgA and IgM. Methods for fusing or conjugating the polypeptides of the present invention to antibody portions are known in the art. See, e.g., U.S. Pat. Nos. 5,336,603; 5,622,929; 5,359,046; 5,349,053; 5,447,851; 5,112,946; EP 307,434; EP 367,166; PCT publications WO 96/04388; WO 91/06570; Ashkenazi et al., Proc. Natl. Acad. Sci. USA 88:10535-10539 (1991); Zheng et al., J. Immunol. 154:5590-5600 (1995); and Vil et al., Proc. Natl. Acad. Sci. USA 89:11337-11341(1992) (said references incorporated by reference in their entireties).

[0207] As discussed, supra, the polypeptides corresponding to a polypeptide, polypeptide fragment, or a variant of SEQ ID NO:Y may be fused or conjugated to the above antibody portions to increase the in vivo half life of the polypeptides or for use in immunoassays using methods known in the art. Further, the polypeptides corresponding to SEQ ID NO:Y may be fused or conjugated to the above antibody portions to facilitate purification. One reported example describes chimeric proteins consisting of the first two domains of the human CD4-polypeptide and various domains of the constant regions of the heavy or light chains of mammalian immunoglobulins. (EP 394,827; Traunecker et al., Nature 331:84-86 (1988). The polypeptides of the present invention fused or conjugated to an antibody having disulfide- linked dimeric structures (due to the IgG) may also be more efficient in binding and neutralizing other molecules, than the monomeric secreted protein or protein fragment alone. (Fountoulakis et al., J. Biochem. 270:3958-3964 (1995)). In many cases, the Fc part in a fusion protein is beneficial in therapy and diagnosis, and thus can result in, for example, improved pharmacokinetic properties. (EP A 232,262). Alternatively, deleting the Fc part after the fusion protein has been expressed, detected, and purified, would be desired. For example, the Fc portion may hinder therapy and diagnosis if the fusion protein is used as an antigen for immunizations. In drug discovery, for example, human proteins, such as hIL-5, have been fused with Fc portions for the purpose of high-throughput screening assays to identify antagonists of hIL-5. (See, Bennett et al., J. Molecular Recognition 8:52-58 (1995); Johanson et al., J. Biol. Chem. 270:9459-9471 (1995).

[0208] Moreover, the antibodies or fragments thereof of the present invention can be fused to marker sequences, such as a peptide to facilitate purification. In preferred embodiments, the marker amino acid sequence is a hexa-histidine peptide, such as the tag provided in a pQE vector (QIAGEN, Inc., 9259 Eton Avenue, Chatsworth, Calif., 91311), among others, many of which are commercially available. As described in Gentz et al., Proc. Natl. Acad. Sci. USA 86:821-824 (1989), for instance, hexa-histidine provides for convenient purification of the fusion protein. Other peptide tags useful for purification include, but are not limited to, the “HA” tag, which corresponds to an epitope derived from the influenza hemagglutinin protein (Wilson et al., Cell 37:767 (1984)) and the “flag” tag.

[0209] The present invention further encompasses antibodies or fragments thereof conjugated to a diagnostic or therapeutic agent. The antibodies can be used diagnostically to, for example, monitor the development or progression of a tumor as part of a clinical testing procedure to, e.g., determine the efficacy of a given treatment regimen. Detection can be facilitated by coupling the antibody to a detectable substance. Examples of detectable substances include various enzymes, prosthetic groups, fluorescent materials, luminescent materials, bioluminescent materials, radioactive materials, positron emitting metals using various positron emission tomographies, and nonradioactive paramagnetic metal ions. The detectable substance may be coupled or conjugated either directly to the antibody (or fragment thereof) or indirectly, through an intermediate (such as, for example, a linker known in the art) using techniques known in the art. See, for example, U.S. Pat. No. 4,741,900 for metal ions which can be conjugated to antibodies for use as diagnostics according to the present invention. Examples of suitable enzymes include horseradish peroxidase, alkaline phosphatase, beta-galactosidase, or acetylcholinesterase; examples of suitable prosthetic group complexes include streptavidin/biotin and avidin/biotin; examples of suitable fluorescent materials include umbelliferone, fluorescein, fluorescein isothiocyanate, rhodamine, dichlorotriazinylamine fluorescein, dansyl chloride or phycoerythrin; an example of a luminescent material includes luminol; examples of bioluminescent materials include luciferase, luciferin, and aequorin; and examples of suitable radioactive material include 125I, 131I, 111In or 99Tc.

[0210] Further, an antibody or fragment thereof may be conjugated to a therapeutic moiety such as a cytotoxin, e.g., a cytostatic or cytocidal agent, a therapeutic agent or a radioactive metal ion, e.g., alpha-emitters such as, for example, 213Bi. A cytotoxin or cytotoxic agent includes any agent that is detrimental to cells. Examples include paclitaxol, cytochalasin B, gramicidin D, ethidium bromide, emetine, mitomycin, etoposide, tenoposide, vincristine, vinblastine, colchicin, doxorubicin, daunorubicin, dihydroxy anthracin dione, mitoxantrone, mithramycin, actinomycin D, 1-dehydrotestosterone, glucocorticoids, procaine, tetracaine, lidocaine, propranolol, and puromycin and analogs or homologs thereof. Therapeutic agents include, but are not limited to, antimetabolites (e.g., methotrexate, 6-mercaptopurine, 6-thioguanine, cytarabine, 5-fluorouracil decarbazine), alkylating agents (e.g., mechlorethamine, thioepa chlorambucil, melphalan, carmustine (BSNU) and lomustine (CCNU), cyclothospharnide, busulfan, dibromomannitol, streptozotocin, mitomycin C, and cis- dichlorodiamine platinum (II) (DDP) cisplatin), anthracyclines (e.g., daunorubicin (formerly daunomycin) and doxorubicin), antibiotics (e.g., dactinomycin (formerly actinomycin), bleomycin, mithramycin, and anthramycin (AMC)), and anti-mitotic agents (e.g., vincristine and vinblastine).

[0211] The conjugates of the invention can be used for modifying a given biological response, the therapeutic agent or drug moiety is not to be construed as limited to classical chemical therapeutic agents. For example, the drug moiety may be a protein or polypeptide possessing a desired biological activity. Such proteins may include, for example, a toxin such as abrin, ricin A, pseudomonas exotoxin, or diphtheria toxin; a protein such as tumor necrosis factor, a-interferon, β-interferon, nerve growth factor, platelet derived growth factor, tissue plasminogen activator, an apoptotic agent, e.g., TNF-alpha, TNF-beta, AIM I (See, International Publication No. WO 97/33899), AIM II (See, International Publication No. WO 97134911), Fas Ligand (Takahashi et al., Int. Immunol., 6:1567-1574 (1994)), VEGI (See, International Publication No. WO 99/23105), a thrombotic agent or an anti- angiogenic agent, e.g., angiostatin or endostatin; or, biological response modifiers such as, for example, lymphokines, interleukin-1 (“IL-1”), interleukin-2 (“IL-2”), interleukin-6 (“IL-6”), granulocyte macrophage colony stimulating factor (“GM-CSF”), granulocyte colony stimulating factor (“G-CSF”), or other growth factors.

[0212] Antibodies may also be attached to solid supports, which are particularly useful for immunoassays or purification of the target antigen. Such solid supports include, but are not limited to, glass, cellulose, polyacrylamide, nylon, polystyrene, polyvinyl chloride or polypropylene.

[0213] Techniques for conjugating such therapeutic moiety to antibodies are well known, see, e.g., Arnon et al., “Monoclonal Antibodies For Immunotargeting Of Drugs In Cancer Therapy”, in Monoclonal Antibodies And Cancer Therapy, Reisfeld et al. (eds.), pp. 243-56 (Alan R. Liss, Inc. 1985); Hellstrom et al., “Antibodies For Drug Delivery”, in Controlled Drug Delivery (2nd Ed.), Robinson et al. (eds.), pp. 623-53 (Marcel Dekker, Inc. 1987); Thorpe, “Antibody Carriers Of Cytotoxic Agents In Cancer Therapy: A Review”, in Monoclonal Antibodies '84: Biological And Clinical Applications, Pinchera et al. (eds.), pp. 475-506 (1985); “Analysis, Results, And Future Prospective Of The Therapeutic Use Of Radiolabeled Antibody In Cancer Therapy”, in Monoclonal Antibodies For Cancer Detection And Therapy, Baldwin et al. (eds.), pp. 303-16 (Academic Press 1985), and Thorpe et al., “The Preparation And Cytotoxic Properties Of Antibody-Toxin Conjugates”, Immunol. Rev. 62:119-58 (1982).

[0214] Alternatively, an antibody can be conjugated to a second antibody to form an antibody heteroconjugate as described by Segal in U.S. Pat. No. 4,676,980, which is incorporated herein by reference in its entirety.

[0215] An antibody, with or without a therapeutic moiety conjugated to it, administered alone or in combination with cytotoxic factor(s) and/or cytokine(s) can be used as a therapeutic.

[0216] Immunophenotyping

[0217] The antibodies of the invention may be utilized for immunophenotyping of cell lines and biological samples. The translation product of the gene of the present invention may be useful as a cell specific marker, or more specifically as a cellular marker that is differentially expressed at various stages of differentiation and/or maturation of particular cell types. Monoclonal antibodies directed against a specific epitope, or combination of epitopes, will allow for the screening of cellular populations expressing the marker. Various techniques can be utilized using monoclonal antibodies to screen for cellular populations expressing the marker(s), and include magnetic separation using antibody-coated magnetic beads, “panning” with antibody attached to a solid matrix (i.e., plate), and flow cytometry (See, e.g., U.S. Pat. No. 5,985,660; and Morrison et al., Cell, 96:737-49 (1999)).

[0218] These techniques allow for the screening of particular populations of cells, such as might be found with hematological malignancies (i.e. minimal residual disease (MRD) in acute leukemic patients) and “non-self” cells in transplantations to prevent Graft-versus-Host Disease (GVHD). Alternatively, these techniques allow for the screening of hematopoietic stem and progenitor cells capable of undergoing proliferation and/or differentiation, as might be found in human umbilical cord blood.

[0219] Assays For Antibody Binding

[0220] The antibodies of the invention may be assayed for immunospecific binding by any method known in the art. The immunoassays which can be used include but are not limited to competitive and non-competitive assay systems using techniques such as western blots, radioimmunoassays, ELISA (enzyme linked immunosorbent assay), “sandwich” immunoassays, immunoprecipitation assays, precipitin reactions, gel diffusion precipitin reactions, immunodiffusion assays, agglutination assays, complement-fixation assays, immunoradiometric assays, fluorescent immunoassays, protein A immunoassays, to name but a few. Such assays are routine and well known in the art (see, e.g., Ausubel et al, eds, 1994, Current Protocols in Molecular Biology, Vol. 1, John Wiley & Sons, Inc., New York, which is incorporated by reference herein in its entirety). Exemplary immunoassays are described briefly below (but are not intended by way of limitation).

[0221] Immunoprecipitation protocols generally comprise lysing a population of cells in a lysis buffer such as RIPA buffer (1% NP-40 or Triton X-100, 1% sodium deoxycholate, 0.1% SDS, 0.15 M NaCl, 0.01 M sodium phosphate at pH 7.2, 1% Trasylol) supplemented with protein phosphatase and/or protease inhibitors (e.g., EDTA, PMSF, aprotinin, sodium vanadate), adding the antibody of interest to the cell lysate, incubating for a period of time (e.g., 1-4 hours) at 4° C., adding protein A and/or protein G sepharose beads to the cell lysate, incubating for about an hour or more at 4° C., washing the beads in lysis buffer and resuspending the beads in SDS/sample buffer. The ability of the antibody of interest to immunoprecipitate a particular antigen can be assessed by, e.g., western blot analysis. One of skill in the art would be knowledgeable as to the parameters that can be modified to increase the binding of the antibody to an antigen and decrease the background (e.g., pre-clearing the cell lysate with sepharose beads). For further discussion regarding immunoprecipitation protocols see, e.g., Ausubel et al, eds, 1994, Current Protocols in Molecular Biology, Vol. 1, John Wiley & Sons, Inc., New York at 10.16.1.

[0222] Western blot analysis generally comprises preparing protein samples, electrophoresis of the protein samples in a polyacrylamide gel (e.g., 8%-20% SDS-PAGE depending on the molecular weight of the antigen), transferring the protein sample from the polyacrylamide gel to a membrane such as nitrocellulose, PVDF or nylon, blocking the membrane in blocking solution (e.g., PBS with 3% BSA or non-fat milk), washing the membrane in washing buffer (e.g., PBS-Tween 20), blocking the membrane with primary antibody (the antibody of interest) diluted in blocking buffer, washing the membrane in washing buffer, blocking the membrane with a secondary antibody (which recognizes the primary antibody, e.g., an anti-human antibody) conjugated to an enzymatic substrate (e.g., horseradish peroxidase or alkaline phosphatase) or radioactive molecule (e.g., 32P or 1251) diluted in blocking buffer, washing the membrane in wash buffer, and detecting the presence of the antigen. One of skill in the art would be knowledgeable as to the parameters that can be modified to increase the signal detected and to reduce the background noise. For further discussion regarding western blot protocols see, e.g., Ausubel et al, eds, 1994, Current Protocols in Molecular Biology, Vol. 1, John Wiley & Sons, Inc., New York at 10.8.1.

[0223] ELISAs comprise preparing antigen, coating the well of a 96 well microtiter plate with the antigen, adding the antibody of interest conjugated to a detectable compound such as an enzymatic substrate (e.g., horseradish peroxidase or alkaline phosphatase) to the well and incubating for a period of time, and detecting the presence of the antigen. In ELISAs the antibody of interest does not have to be conjugated to a detectable compound; instead, a second antibody (which recognizes the antibody of interest) conjugated to a detectable compound may be added to the well. Further, instead of coating the well with the antigen, the antibody may be coated to the well. In this case, a second antibody conjugated to a detectable compound may be added following the addition of the antigen of interest to the coated well. One of skill in the art would be knowledgeable as to the parameters that can be modified to increase the signal detected as well as other variations of ELISAs known in the art. For further discussion regarding ELISAs see, e.g., Ausubel et al, eds, 1994, Current Protocols in Molecular Biology, Vol. 1, John Wiley & Sons, Inc., New York at 11.2.1.

[0224] The binding affinity of an antibody to an antigen and the off-rate of an antibody-antigen interaction can be determined by competitive binding assays. One example of a competitive binding assay is a radioimmunoassay comprising the incubation of labeled antigen (e.g., 3H or 1251) with the antibody of interest in the presence of increasing amounts of unlabeled antigen, and the detection of the antibody bound to the labeled antigen. The affinity of the antibody of interest for a particular antigen and the binding off-rates can be determined from the data by scatchard plot analysis. Competition with a second antibody can also be determined using radioimmunoassays. In this case, the antigen is incubated with antibody of interest conjugated to a labeled compound (e.g., 3H or 1251) in the presence of increasing amounts of an unlabeled second antibody.

[0225] Therapeutic Uses

[0226] The present invention is further directed to antibody -based therapies which involve administering antibodies of the invention to an animal, preferably a mammal, and most preferably a human, patient for treating one or more of the disclosed diseases, disorders, or conditions. Therapeutic compounds of the invention include, but are not limited to, antibodies of the invention (including fragments, analogs and derivatives thereof as described herein) and nucleic acids encoding antibodies of the invention (including fragments, analogs and derivatives thereof and anti-idiotypic antibodies as described herein). The antibodies of the invention can be used to treat, inhibit or prevent diseases, disorders or conditions associated with aberrant expression and/or activity of a polypeptide of the invention, including, but not limited to, any one or more of the diseases, disorders, or conditions described herein. The treatment and/or prevention of diseases, disorders, or conditions associated with aberrant expression and/or activity of a polypeptide of the invention includes, but is not limited to, alleviating symptoms associated with those diseases, disorders or conditions. Antibodies of the invention may be provided in pharmaceutically acceptable compositions as known in the art or as described herein.

[0227] A summary of the ways in which the antibodies of the present invention may be used therapeutically includes binding polynucleotides or polypeptides of the present invention locally or systemically in the body or by direct cytotoxicity of the antibody, e.g. as mediated by complement (CDC) or by effector cells (ADCC). Some of these approaches are described in more detail below. Armed with the teachings provided herein, one of ordinary skill in the art will know how to use the antibodies of the present invention for diagnostic, monitoring or therapeutic purposes without undue experimentation.

[0228] The antibodies of this invention may be advantageously utilized in combination with other monoclonal or chimeric antibodies, or with lymphokines or hematopoietic growth factors (such as, e.g., IL-2, IL-3 and IL-7), for example, which serve to increase the number or activity of effector cells which interact with the antibodies.

[0229] The antibodies of the invention may be administered alone or in combination with other types of treatments (e.g., radiation therapy, chemotherapy, hormonal therapy, immunotherapy and anti-tumor agents). Generally, administration of products of a species origin or species reactivity (in the case of antibodies) that is the same species as that of the patient is preferred. Thus, in a preferred embodiment, human antibodies, fragments derivatives, analogs, or nucleic acids, are administered to a human patient for therapy or prophylaxis.

[0230] It is preferred to use high affinity and/or potent in vivo inhibiting and/or neutralizing antibodies against polypeptides or polynucleotides of the present invention, fragments or regions thereof, for both immunoassays directed to and therapy of disorders related to polynucleotides or polypeptides, including fragments thereof, of the present invention. Such antibodies, fragments, or regions, will preferably have an affinity for polynucleotides or polypeptides of the invention, including fragments thereof. Preferred binding affinities include those with a dissociation constant or Kd less than 5×10⁻² M, 10⁻² M, 5×10⁻³ M, 10⁻³ M, 5×10⁻⁴ M, 10⁻⁴ M, 5×10⁻⁵ M, 10⁻⁵ M, 5×10⁻⁶ M, 10⁻⁶ M, 5×10⁻⁷ M, 10⁻⁷ M, 5×10⁻⁸ M, 10⁻⁸ M, 5×10⁻⁹M, 10⁻⁹ M, 5×10⁻¹⁰ M, 10⁻¹⁰ M, 5×10⁻¹¹ M, 10⁻¹¹ M, 5×10⁻¹² M, 10⁻¹² M, 5×10⁻¹³ M, 10⁻¹³ M, 5×10⁻¹⁴ M, 10⁻¹⁴ M, 5×10⁻¹⁵ M, and 10⁻¹⁵ M.

[0231] Gene Therapy

[0232] In a specific embodiment, nucleic acids comprising sequences encoding antibodies or functional derivatives thereof, are administered to treat, inhibit or prevent a disease or disorder associated with aberrant expression and/or activity of a polypeptide of the invention, by way of gene therapy. Gene therapy refers to therapy performed by the administration to a subject of an expressed or expressible nucleic acid. In this embodiment of the invention, the nucleic acids produce their encoded protein that mediates a therapeutic effect.

[0233] Any of the methods for gene therapy available in the art can be used according to the present invention. Exemplary methods are described below.

[0234] For general reviews of the methods of gene therapy, see Goldspiel et al., Clinical Pharmacy 12:488-505 (1993); Wu and Wu, Biotherapy 3:87-95 (1991); Tolstoshev, Ann. Rev. Pharmacol. Toxicol. 32:573-596 (1993); Mulligan, Science 260:926-932 (1993); and Morgan and Anderson, Ann. Rev. Biochem. 62:191-217 (1993); May, TIBTECH 11(5):155-215 (1993). Methods commonly known in the art of recombinant DNA technology which can be used are described in Ausubel et al. (eds.), Current Protocols in Molecular Biology, John Wiley & Sons, NY (1993); and Kriegler, Gene Transfer and Expression, A Laboratory Manual, Stockton Press, NY (1990).

[0235] In a preferred aspect, the compound comprises nucleic acid sequences encoding an antibody, said nucleic acid sequences being part of expression vectors that express the antibody or fragments or chimeric proteins or heavy or light chains thereof in a suitable host. In particular, such nucleic acid sequences have promoters operably linked to the antibody coding region, said promoter being inducible or constitutive, and, optionally, tissue-specific. In another particular embodiment, nucleic acid molecules are used in which the antibody coding sequences and any other desired sequences are flanked by regions that promote homologous recombination at a desired site in the genome, thus providing for intrachromosomal expression of the antibody encoding nucleic acids (Koller and Smithies, Proc. Natl. Acad. Sci. USA 86:8932-8935 (1989); Zijlstra et al., Nature 342:435-438 (1989). In specific embodiments, the expressed antibody molecule is a single chain antibody; alternatively, the nucleic acid sequences include sequences encoding both the heavy and light chains, or fragments thereof, of the antibody.

[0236] Delivery of the nucleic acids into a patient may be either direct, in which case the patient is directly exposed to the nucleic acid or nucleic acid- carrying vectors, or indirect, in which case, cells are first transformed with the nucleic acids in vitro, then transplanted into the patient. These two approaches are known, respectively, as in vivo or ex vivo gene therapy.

[0237] In a specific embodiment, the nucleic acid sequences are directly administered in vivo, where it is expressed to produce the encoded product. This can be accomplished by any of numerous methods known in the art, e.g., by constructing them as part of an appropriate nucleic acid expression vector and administering it so that they become intracellular, e.g., by infection using defective or attenuated retrovirals or other viral vectors (see U.S. Pat. No. 4,980,286), or by direct injection of naked DNA, or by use of microparticle bombardment (e.g., a gene gun; Biolistic, Dupont), or coating with lipids or cell-surface receptors or transfecting agents, encapsulation in liposomes, microparticles, or microcapsules, or by administering them in linkage to a peptide which is known to enter the nucleus, by administering it in linkage to a ligand subject to receptor-mediated endocytosis (see, e.g., Wu and Wu, J. Biol. Chem. 262:4429-4432 (1987)) (which can be used to target cell types specifically expressing the receptors), etc. In another embodiment, nucleic acid-ligand complexes can be formed in which the ligand comprises a fusogenic viral peptide to disrupt endosomes, allowing the nucleic acid to avoid lysosomal degradation. In yet another embodiment, the nucleic acid can be targeted in vivo for cell specific uptake and expression, by targeting a specific receptor (see, e.g., PCT Publications WO 92/06180; WO 92/22635; WO92/20316; WO93/14188, WO 93/20221). Alternatively, the nucleic acid can be introduced intracellularly and incorporated within host cell DNA for expression, by homologous recombination (Koller and Smithies, Proc. Natl. Acad. Sci. USA 86:8932-8935 (1989); Zijlstra et al., Nature 342:435-438 (1989)).

[0238] In a specific embodiment, viral vectors that contains nucleic acid sequences encoding an antibody of the invention are used. For example, a retroviral vector can be used (see Miller et al., Meth. Enzymol. 217:581-599 (1993)). These retroviral vectors contain the components necessary for the correct packaging of the viral genome and integration into the host cell DNA. The nucleic acid sequences encoding the antibody to be used in gene therapy are cloned into one or more vectors, which facilitates delivery of the gene into a patient. More detail about retroviral vectors can be found in Boesen et al., Biotherapy 6:291-302 (1994), which describes the use of a retroviral vector to deliver the mdrl gene to hematopoietic stem cells in order to make the stem cells more resistant to chemotherapy. Other references illustrating the use of retroviral vectors in gene therapy are: Clowes et al., J. Clin. Invest. 93:644-651 (1994); Kiem et al., Blood 83:1467-1473 (1994); Salmons and Gunzberg, Human Gene Therapy 4:129-141 (1993); and Grossman and Wilson, Curr. Opin. in Genetics and Devel. 3:110-114 (1993).

[0239] Adenoviruses are other viral vectors that can be used in gene therapy. Adenoviruses are especially attractive vehicles for delivering genes to respiratory epithelia. Adenoviruses naturally infect respiratory epithelia where they cause a mild disease. Other targets for adenovirus-based delivery systems are liver, the central nervous system, endothelial cells, and muscle. Adenoviruses have the advantage of being capable of infecting non-dividing cells. Kozarsky and Wilson, Current Opinion in Genetics and Development 3:499-503 (1993) present a review of adenovirus-based gene therapy. Bout et al., Human Gene Therapy 5:3-10 (1994) demonstrated the use of adenovirus vectors to transfer genes to the respiratory epithelia of rhesus monkeys. Other instances of the use of adenoviruses in gene therapy can be found in Rosenfeld et al., Science 252:431434 (1991); Rosenfeld et al., Cell 68:143-155 (1992); Mastrangeli et al., J. Clin. Invest. 91:225-234 (1993); PCT Publication WO94/12649; and Wang, et al., Gene Therapy 2:775-783 (1995). In a preferred embodiment, adenovirus vectors are used.

[0240] Adeno-associated virus (AAV) has also been proposed for use in gene therapy (Walsh et al., Proc. Soc. Exp. Biol. Med. 204:289-300 (1993); U.S. Pat. No. 5,436,146).

[0241] Another approach to gene therapy involves transferring a gene to cells in tissue culture by such methods as electroporation, lipofection, calcium phosphate mediated transfection, or viral infection. Usually, the method of transfer includes the transfer of a selectable marker to the cells. The cells are then placed under selection to isolate those cells that have taken up and are expressing the transferred gene. Those cells are then delivered to a patient.

[0242] In this embodiment, the nucleic acid is introduced into a cell prior to administration in vivo of the resulting recombinant cell. Such introduction can be carried out by any method known in the art, including but not limited to transfection, electroporation, microinjection, infection with a viral or bacteriophage vector containing the nucleic acid sequences, cell fusion, chromosome-mediated gene transfer, microcell-mediated gene transfer, spheroplast fusion, etc. Numerous techniques are known in the art for the introduction of foreign genes into cells (see, e.g., Loeffler and Behr, Meth. Enzymol. 217:599-618 (1993); Cohen et al., Meth. Enzymol. 217:618-644 (1993); Cline, Pharmac. Ther. 29:69-92m (1985) and may be used in accordance with the present invention, provided that the necessary developmental and physiological functions of the recipient cells are not disrupted. The technique should provide for the stable transfer of the nucleic acid to the cell, so that the nucleic acid is expressible by the cell and preferably heritable and expressible by its cell progeny.

[0243] The resulting recombinant cells can be delivered to a patient by various methods known in the art. Recombinant blood cells (e.g., hematopoietic stem or progenitor cells) are preferably administered intravenously. The amount of cells envisioned for use depends on the desired effect, patient state, etc., and can be determined by one skilled in the art.

[0244] Cells into which a nucleic acid can be introduced for purposes of gene therapy encompass any desired, available cell type, and include but are not limited to epithelial cells, endothelial cells, keratinocytes, fibroblasts, muscle cells, hepatocytes; blood cells such as Tlymphocytes, Blymphocytes, monocytes, macrophages, neutrophils, eosinophils, megakaryocytes, granulocytes; various stem or progenitor cells, in particular hematopoietic stem or progenitor cells, e.g., as obtained from bone marrow, umbilical cord blood, peripheral blood, fetal liver, etc.

[0245] In a preferred embodiment, the cell used for gene therapy is autologous to the patient.

[0246] In an embodiment in which recombinant cells are used in gene therapy, nucleic acid sequences encoding an antibody are introduced into the cells such that they are expressible by the cells or their progeny, and the recombinant cells are then administered in vivo for therapeutic effect. In a specific embodiment, stem or progenitor cells are used. Any stem and/or progenitor cells which can be isolated and maintained in vitro can potentially be used in accordance with this embodiment of the present invention (see e.g. PCT Publication WO 94/08598; Stemple and Anderson, Cell 71:973-985 (1992); Rheinwald, Meth. Cell Bio. 21A:229 (1980); and Pittelkow and Scott, Mayo Clinic Proc. 61:771 (1986)).

[0247] In a specific embodiment, the nucleic acid to be introduced for purposes of gene therapy comprises an inducible promoter operably linked to the coding region, such that expression of the nucleic acid is controllable by controlling the presence or absence of the appropriate inducer of transcription. Demonstration of Therapeutic or Prophylactic Activity

[0248] The compounds or pharmaceutical compositions of the invention are preferably tested in vitro, and then in vivo for the desired therapeutic or prophylactic activity, prior to use in humans. For example, in vitro assays to demonstrate the therapeutic or prophylactic utility of a compound or pharmaceutical composition include, the effect of a compound on a cell line or a patient tissue sample. The effect of the compound or composition on the cell line and/or tissue sample can be determined utilizing techniques known to those of skill in the art including, but not limited to, rosette formation assays and cell lysis assays. In accordance with the invention, in vitro assays which can be used to determine whether administration of a specific compound is indicated, include in vitro cell culture assays in which a patient tissue sample is grown in culture, and exposed to or otherwise administered a compound, and the effect of such compound upon the tissue sample is observed.

[0249] Therapeutic/Prophylactic Administration and Composition

[0250] The invention provides methods of treatment, inhibition and prophylaxis by administration to a subject of an effective amount of a compound or pharmaceutical composition of the invention, preferably a polypeptide or antibody of the invention. In a preferred aspect, the compound is substantially purified (e.g., substantially free from substances that limit its effect or produce undesired side-effects). The subject is preferably an animal, including but not limited to animals such as cows, pigs, horses, chickens, cats, dogs, etc., and is preferably a mammal, and most preferably human.

[0251] Formulations and methods of administration that can be employed when the compound comprises a nucleic acid or an immunoglobulin are described above; additional appropriate formulations and routes of administration can be selected from among those described herein below.

[0252] Various delivery systems are known and can be used to administer a compound of the invention, e.g., encapsulation in liposomes, microparticles, microcapsules, recombinant cells capable of expressing the compound, receptor-mediated endocytosis (see, e.g., Wu and Wu, J. Biol. Chem. 262:4429-4432 (1987)), construction of a nucleic acid as part of a retroviral or other vector, etc. Methods of introduction include but are not limited to intradermal, intramuscular, intraperitoneal, intravenous, subcutaneous, intranasal, epidural, and oral routes. The compounds or compositions may be administered by any convenient route, for example by infusion or bolus injection, by absorption through epithelial or mucocutaneous linings (e.g., oral mucosa, rectal and intestinal mucosa, etc.) and may be administered together with other biologically active agents. Administration can be systemic or local. In addition, it may be desirable to introduce the pharmaceutical compounds or compositions of the invention into the central nervous system by any suitable route, including intraventricular and intrathecal injection; intraventricular injection may be facilitated by an intraventricular catheter, for example, attached to a reservoir, such as an Ommaya reservoir. Pulmonary administration can also be employed, e.g., by use of an inhaler or nebulizer, and formulation with an aerosolizing agent.

[0253] In a specific embodiment, it may be desirable to administer the pharmaceutical compounds or compositions of the invention locally to the area in need of treatment; this may be achieved by, for example, and not by way of limitation, local infusion during surgery, topical application, e.g., in conjunction with a wound dressing after surgery, by injection, by means of a catheter, by means of a suppository, or by means of an implant, said implant being of a porous, non-porous, or gelatinous material, including membranes, such as sialastic membranes, or fibers. Preferably, when administering a protein, including an antibody, of the invention, care must be taken to use materials to which the protein does not absorb.

[0254] In another embodiment, the compound or composition can be delivered in a vesicle, in particular a liposome (see Langer, Science 249:1527-1533 (1990); Treat et al., in Liposomes in the Therapy of Infectious Disease and Cancer, Lopez-Berestein and Fidler (eds.), Liss, New York, pp. 353-365 (1989); Lopez-Berestein, ibid., pp. 317-327; see generally ibid.)

[0255] In yet another embodiment, the compound or composition can be delivered in a controlled release system. In one embodiment, a pump may be used (see Langer, supra; Sefton, CRC Crit. Ref. Biomed. Eng. 14:201 (1987); Buchwald et al., Surgery 88:507 (1980); Saudek et al., N. Engl. J. Med. 321:574 (1989)). In another embodiment, polymeric materials can be used (see Medical Applications of Controlled Release, Langer and Wise (eds.), CRC Pres., Boca Raton, Florida (1974); Controlled Drug Bioavailability, Drug Product Design and Performance, Smolen and Ball (eds.), Wiley, New York (1984); Ranger and Peppas, J., Macromol. Sci. Rev. Macromol. Chem. 23:61 (1983); see also Levy et al., Science 228:190 (1985); During et al., Ann. Neurol. 25:351 (1989); Howard et al., J.Neurosurg. 71:105 (1989)). In yet another embodiment, a controlled release system can be placed in proximity of the therapeutic target, i.e., the brain, thus requiring only a fraction of the systemic dose (see, e.g., Goodson, in Medical Applications of Controlled Release, supra, vol. 2, pp. 115-138 (1984)).

[0256] Other controlled release systems are discussed in the review by Langer (Science 249:1527-1533 (1990)).

[0257] In a specific embodiment where the compound of the invention is a nucleic acid encoding a protein, the nucleic acid can be administered in vivo to promote expression of its encoded protein, by constructing it as part of an appropriate nucleic acid expression vector and administering it so that it becomes intracellular, e.g., by use of a retroviral vector (see U.S. Pat. No. 4,980,286), or by direct injection, or by use of microparticle bombardment (e.g., a gene gun; Biolistic, Dupont), or coating with lipids or cell-surface receptors or transfecting agents, or by administering it in linkage to a homeobox- like peptide which is known to enter the nucleus (see e.g., Joliot et al., Proc. Natl. Acad. Sci. USA 88:1864-1868 (1991)), etc. Alternatively, a nucleic acid can be introduced intracellularly and incorporated within host cell DNA for expression, by homologous recombination.

[0258] The present invention also provides pharmaceutical compositions. Such compositions comprise a therapeutically effective amount of a compound, and a pharmaceutically acceptable carrier. In a specific embodiment, the term “pharmaceutically acceptable” means approved by a regulatory agency of the Federal or a state government or listed in the U.S. Pharmacopeia or other generally recognized pharmacopeia for use in animals, and more particularly in humans. The term “carrier” refers to a diluent, adjuvant, excipient, or vehicle with which the therapeutic is administered. Such pharmaceutical carriers can be sterile liquids, such as water and oils, including those of petroleum, animal, vegetable or synthetic origin, such as peanut oil, soybean oil, mineral oil, sesame oil and the like. Water is a preferred carrier when the pharmaceutical composition is administered intravenously. Saline solutions and aqueous dextrose and glycerol solutions can also be employed as liquid carriers, particularly for injectable solutions. Suitable pharmaceutical excipients include starch, glucose, lactose, sucrose, gelatin, malt, rice, flour, chalk, silica gel, sodium stearate, glycerol monostearate, talc, sodium chloride, dried skim milk, glycerol, propylene, glycol, water, ethanol and the like. The composition, if desired, can also contain minor amounts of wetting or emulsifying agents, or pH buffering agents. These compositions can take the form of solutions, suspensions, emulsion, tablets, pills, capsules, powders, sustained-release formulations and the like. The composition can be formulated as a suppository, with traditional binders and carriers such as triglycerides. Oral formulation can include standard carriers such as pharmaceutical grades of mannitol, lactose, starch, magnesium stearate, sodium saccharine, cellulose, magnesium carbonate, etc. Examples of suitable pharmaceutical carriers are described in “Remington's Pharmaceutical Sciences” by E. W. Martin. Such compositions will contain a therapeutically effective amount of the compound, preferably in purified form, together with a suitable amount of carrier so as to provide the form for proper administration to the patient. The formulation should suit the mode of administration.

[0259] In a preferred embodiment, the composition is formulated in accordance with routine procedures as a pharmaceutical composition adapted for intravenous administration to human beings. Typically, compositions for intravenous administration are solutions in sterile isotonic aqueous buffer. Where necessary, the composition may also include a solubilizing agent and a local anesthetic such as lignocaine to ease pain at the site of the injection. Generally, the ingredients are supplied either separately or mixed together in unit dosage form, for example, as a dry lyophilized powder or water free concentrate in a hermetically sealed container such as an ampoule or sachette indicating the quantity of active agent. Where the composition is to be administered by infusion, it can be dispensed with an infusion bottle containing sterile pharmaceutical grade water or saline. Where the composition is administered by injection, an ampoule of sterile water for injection or saline can be provided so that the ingredients may be mixed prior to administration.

[0260] The compounds of the invention can be formulated as neutral or salt forms. Pharmaceutically acceptable salts include those formed with anions such as those derived from hydrochloric, phosphoric, acetic, oxalic, tartaric acids, etc., and those formed with cations such as those derived from sodium, potassium, ammonium, calcium, ferric hydroxides, isopropylamine, triethylamine, 2-ethylamino ethanol, histidine, procaine, etc.

[0261] The amount of the compound of the invention which will be effective in the treatment, inhibition and prevention of a disease or disorder associated with aberrant expression and/or activity of a polypeptide of the invention can be determined by standard clinical techniques. In addition, in vitro assays may optionally be employed to help identify optimal dosage ranges. The precise dose to be employed in the formulation will also depend on the route of administration, and the seriousness of the disease or disorder, and should be decided according to the judgment of the practitioner and each patient's circumstances. Effective doses may be extrapolated from dose-response curves derived from in vitro or animal model test systems.

[0262] For antibodies, the dosage administered to a patient is typically 0.1 mg/kg to 100 mg/kg of the patient's body weight. Preferably, the dosage administered to a patient is between 0.1 mg/kg and 20 mg/kg of the patient's body weight, more preferably 1 mg/kg to 10 mg/kg of the patient's body weight. Generally, human antibodies have a longer half-life within the human body than antibodies from other species due to the immune response to the foreign polypeptides. Thus, lower dosages of human antibodies and less frequent administration is often possible. Further, the dosage and frequency of administration of antibodies of the invention may be reduced by enhancing uptake and tissue penetration (e.g., into the brain) of the antibodies by modifications such as, for example, lipidation.

[0263] The invention also provides a pharmaceutical pack or kit comprising one or more containers filled with one or more of the ingredients of the pharmaceutical compositions of the invention. Optionally associated with such container(s) can be a notice in the form prescribed by a governmental agency regulating the manufacture, use or sale of pharmaceuticals or biological products, which notice reflects approval by the agency of manufacture, use or sale for human administration.

[0264] Diagnosis and Imaging

[0265] Labeled antibodies, and derivatives and analogs thereof, which specifically bind to a polypeptide of interest can be used for diagnostic purposes to detect, diagnose, or monitor diseases, disorders, and/or conditions associated with the aberrant expression and/or activity of a polypeptide of the invention. The invention provides for the detection of aberrant expression of a polypeptide of interest, comprising (a) assaying the expression of the polypeptide of interest in cells or body fluid of an individual using one or more antibodies specific to the polypeptide interest and (b) comparing the level of gene expression with a standard gene expression level, whereby an increase or decrease in the assayed polypeptide gene expression level compared to the standard expression level is indicative of aberrant expression.

[0266] The invention provides a diagnostic assay for diagnosing a disorder, comprising (a) assaying the expression of the polypeptide of interest in cells or body fluid of an individual using one or more antibodies specific to the polypeptide interest and (b) comparing the level of gene expression with a standard gene expression level, whereby an increase or decrease in the assayed polypeptide gene expression level compared to the standard expression level is indicative of a particular disorder. With respect to cancer, the presence of a relatively high amount of transcript in biopsied tissue from an individual may indicate a predisposition for the development of the disease, or may provide a means for detecting the disease prior to the appearance of actual clinical symptoms. A more definitive diagnosis of this type may allow health professionals to employ preventative measures or aggressive treatment earlier thereby preventing the development or further progression of the cancer.

[0267] Antibodies of the invention can be used to assay protein levels in a biological sample using classical immunohistological methods known to those of skill in the art (e.g., see Jalkanen, et al., J. Cell. Biol. 101:976-985 (1985); Jalkanen, et al., J. Cell Biol. 105:3087-3096 (1987)). Other antibody-based methods useful for detecting protein gene expression include immunoassays, such as the enzyme linked immunosorbent assay (ELISA) and the radioimmunoassay (RIA). Suitable antibody assay labels are known in the art and include enzyme labels, such as, glucose oxidase; radioisotopes, such as iodine (125I, 121I), carbon (14C), sulfur (35S), tritium (3H), indium (112In), and technetium (99Tc); luminescent labels, such as luminol; and fluorescent labels, such as fluorescein and rhodamine, and biotin.

[0268] One aspect of the invention is the detection and diagnosis of a disease or disorder associated with aberrant expression of a polypeptide of interest in an animal, preferably a mammal and most preferably a human. In one embodiment, diagnosis comprises: a) administering (for example, parenterally, subcutaneously, or intraperitoneally) to a subject an effective amount of a labeled molecule which specifically binds to the polypeptide of interest; b) waiting for a time interval following the administering for permitting the labeled molecule to preferentially concentrate at sites in the subject where the polypeptide is expressed (and for unbound labeled molecule to be cleared to background level); c) determining background level; and d) detecting the labeled molecule in the subject, such that detection of labeled molecule above the background level indicates that the subject has a particular disease or disorder associated with aberrant expression of the polypeptide of interest. Background level can be determined by various methods including, comparing the amount of labeled molecule detected to a standard value previously determined for a particular system.

[0269] It will be understood in the art that the size of the subject and the imaging system used will determine the quantity of imaging moiety needed to produce diagnostic images. In the case of a radioisotope moiety, for a human subject, the quantity of radioactivity injected will normally range from about 5 to 20 millicuries of 99mTc. The labeled antibody or antibody fragment will then preferentially accumulate at the location of cells which contain the specific protein. In vivo tumor imaging is described in S.W. Burchiel et al., “Immunopharmacokinetics of Radiolabeled Antibodies and Their Fragments.” (Chapter 13 in Tumor Imaging: The Radiochemical Detection of Cancer, S. W. Burchiel and B. A. Rhodes, eds., Masson Publishing Inc. (1982).

[0270] Depending on several variables, including the type of label used and the mode of administration, the time interval following the administration for permitting the labeled molecule to preferentially concentrate at sites in the subject and for unbound labeled molecule to be cleared to background level is 6 to 48 hours or 6 to 24 hours or 6 to 12 hours. In another embodiment the time interval following administration is 5 to 20 days or S to 10 days.

[0271] In an embodiment, monitoring of the disease or disorder is carried out by repeating the method for diagnosing the disease or disease, for example, one month after initial diagnosis, six months after initial diagnosis, one year after initial diagnosis, etc.

[0272] Presence of the labeled molecule can be detected in the patient using methods known in the art for in vivo scanning. These methods depend upon the type of label used. Skilled artisans will be able to determine the appropriate method for detecting a particular label. Methods and devices that may be used in the diagnostic methods of the invention include, but are not limited to, computed tomography (CT), whole body scan such as position emission tomography (PET), magnetic resonance imaging (MRI), and sonography.

[0273] In a specific embodiment, the molecule is labeled with a radioisotope and is detected in the patient using a radiation responsive surgical instrument (Thurston et al., U.S. Pat. No. 5,441,050). In another embodiment, the molecule is labeled with a fluorescent compound and is detected in the patient using a fluorescence responsive scanning instrument. In another embodiment, the molecule is labeled with a positron emitting metal and is detected in the patent using positron emission-tomography. In yet another embodiment, the molecule is labeled with a paramagnetic label and is detected in a patient using magnetic resonance imaging (MRI).

[0274] Kits

[0275] The present invention provides kits that can be used in the above methods. In one embodiment, a kit comprises an antibody of the invention, preferably a purified antibody, in one or more containers. In a specific embodiment, the kits of the present invention contain a substantially isolated polypeptide comprising an epitope which is specifically immunoreactive with an antibody included in the kit. Preferably, the kits of the present invention further comprise a control antibody which does not react with the polypeptide of interest. In another specific embodiment, the kits of the present invention contain a means for detecting the binding of an antibody to a polypeptide of interest (e.g., the antibody may be conjugated to a detectable substrate such as a fluorescent compound, an enzymatic substrate, a radioactive compound or a luminescent compound, or a second antibody which recognizes the first antibody may be conjugated to a detectable substrate).

[0276] In another specific embodiment of the present invention, the kit is a diagnostic kit for use in screening serum containing antibodies specific against proliferative and/or cancerous polynucleotides and polypeptides. Such a kit may include a control antibody that does not react with the polypeptide of interest. Such a kit may include a substantially isolated polypeptide antigen comprising an epitope which is specifically immunoreactive with at least one anti-polypeptide antigen antibody. Further, such a kit includes means for detecting the binding of said antibody to the antigen (e.g., the antibody may be conjugated to a fluorescent compound such as fluorescein or rhodamine which can be detected by flow cytometry). In specific embodiments, the kit may include a recombinantly produced or chemically synthesized polypeptide antigen. The polypeptide antigen of the kit may also be attached to a solid support.

[0277] In a more specific embodiment the detecting means of the above-described kit includes a solid support to which said polypeptide antigen is attached. Such a kit may also include a non-attached reporter-labeled anti-human antibody. In this embodiment, binding of the antibody to the polypeptide antigen can be detected by binding of the said reporter-labeled antibody.

[0278] In an additional embodiment, the invention includes a diagnostic kit for use in screening serum containing antigens of the polypeptide of the invention. The diagnostic kit includes a substantially isolated antibody specifically immunoreactive with polypeptide or polynucleotide antigens, and means for detecting the binding of the polynucleotide or polypeptide antigen to the antibody. In one embodiment, the antibody is attached to a solid support. In a specific embodiment, the antibody may be a monoclonal antibody. The detecting means of the kit may include a second, labeled monoclonal antibody. Alternatively, or in addition, the detecting means may include a labeled, competing antigen.

[0279] In one diagnostic configuration, test serum is reacted with a solid phase reagent having a surface-bound antigen obtained by the methods of the present invention. After binding with specific antigen antibody to the reagent and removing unbound serum components by washing, the reagent is reacted with reporter-labeled anti-human antibody to bind reporter to the reagent in proportion to the amount of bound anti-antigen antibody on the solid support. The reagent is again washed to remove unbound labeled antibody, and the amount of reporter associated with the reagent is determined. Typically, the reporter is an enzyme which is detected by incubating the solid phase in the presence of a suitable fluorometric, luminescent or calorimetric substrate (Sigma, St. Louis, Mo.).

[0280] The solid surface reagent in the above assay is prepared by known techniques for attaching protein material to solid support material, such as polymeric beads, dip sticks, 96-well plate or filter material. These attachment methods generally include non-specific adsorption of the protein to the support or covalent attachment of the protein, typically through a free amine group, to a chemically reactive group on the solid support, such as an activated carboxyl, hydroxyl, or aldehyde group. Alternatively, streptavidin coated plates can be used in conjunction with biotinylated antigen(s).

[0281] Thus, the invention provides an assay system or kit for carrying out this diagnostic method. The kit generally includes a support with surface- bound recombinant antigens, and a reporter-labeled anti-human antibody for detecting surface-bound anti-antigen antibody.

[0282] Uses of the Polynucleotides

[0283] Each of the polynucleotides identified herein can be used in numerous ways as reagents. The following description should be considered exemplary and utilizes known techniques.

[0284] The cancer antigen polynucleotides of the present invention are useful for chromosome identification. There exists an ongoing need to identify new chromosome markers, since few chromosome marking reagents, based on actual sequence data (repeat polymorphisms), are presently available. Each sequence is specifically targeted to and can hybridize with a particular location on an individual human chromosome, thus each polynucleotide of the present invention can routinely be used as a chromosome marker using techniques known in the art.

[0285] Briefly, sequences can be mapped to chromosomes by preparing PCR primers (preferably at least 15 bp (e.g., 15-25 bp) from the sequences shown in SEQ ID INO:X, or the complement thereto. Primers can optionally be selected using computer analysis so that primers do not span more than one predicted exon in the genomic DNA. These primers are then used for PCR screening of somatic cell hybrids containing individual human chromosomes. Only those hybrids containing the human gene corresponding to SEQ ID NO:X will yield an amplified fragment.

[0286] Similarly, somatic hybrids provide a rapid method of PCR mapping the polynucleotides to particular chromosomes. Three or more clones can be assigned per day using a single thermal cycler. Moreover, sublocalization of the polynucleotides can be achieved with panels of specific chromosome fragments. Other gene mapping strategies that can be used include in situ hybridization, prescreening with labeled flow-sorted chromosomes, preselection by hybridization to construct chromosome specific-cDNA libraries, and computer mapping techniques (See, e.g., Shuler, Trends Biotechnol 16:456-459 (1998) which is hereby incorporated by reference in its entirety).

[0287] Precise chromosomal location of the polynucleotides can also be achieved using fluorescence in situ hybridization (FISH) of a metaphase chromosomal spread. This technique uses polynucleotides as short as 500 or 600 bases; however, polynucleotides 2,000-4,000 bp are preferred. For a review of this technique, see Verma et al., “Human Chromosomes: a Manual of Basic Techniques,” Pergamon Press, New York (1988).

[0288] For chromosome mapping, the polynucleotides can be used individually (to mark a single chromosome or a single site on that chromosome) or in panels (for marking multiple sites and/or multiple chromosomes).

[0289] Thus, the present invention also provides a method for chromosomal localization which involves (a) preparing PCR primers from the polynucleotide sequences in Table 3 and SEQ ID NO:X and (b) screening somatic cell hybrids containing individual chromosomes.

[0290] The polynucleotides of the present invention would likewise be useful for radiation hybrid mapping, HAPPY mapping, and long range restriction mapping. For a review of these techniques and others known in the art, see, e.g. Dear, “Genome Mapping: A Practical Approach,” IRL Press at Oxford University Press, London (1997); Aydin, J. Mol. Med. 77:691-694 (1999); Hacia et al., Mol. Psychiatry 3:483-492 (1998); Herrick et al., Chromosome Res. 7:409-423 (1999); Hamilton et al., Methods Cell Biol. 62:265-280 (2000); and/or Ott, J. Hered. 90:68-70 (1999) each of which is hereby incorporated by reference in its entirety.

[0291] Once a polynucleotide has been mapped to a precise chromosomal location, the physical position of the polynucleotide can be used in linkage analysis. Linkage analysis establishes coinheritance between a chromosomal location and presentation of a particular disease. (Disease mapping data are found, for example, in V. McKusick, Mendelian Inheritance in Man (available on line through Johns Hopkins University Welch Medical Library).) Assuming 1 megabase mapping resolution and one gene per 20 kb, a cDNA precisely localized to a chromosomal region associated with the disease could be one of 50-500 potential causative genes.

[0292] Thus, once coinheritance is established, differences in a polynucleotide of the invention and the corresponding gene between affected and unaffected individuals can be examined. First, visible structural alterations in the chromosomes, such as deletions or translocations, are examined in chromosome spreads or by PCR. If no structural alterations exist, the presence of point mutations are ascertained. Mutations observed in some or all affected individuals, but not in normal individuals, indicates that the mutation may cause the disease. However, complete sequencing of the polypeptide and the corresponding gene from several normal individuals is required to distinguish the mutation from a polymorphism. If a new polymorphism is identified, this polymorphic polypeptide can be used for further linkage analysis.

[0293] Furthermore, increased or decreased expression of the gene in affected individuals as compared to unaffected individuals can be assessed using the polynucleotides of the invention. Any of these alterations (altered expression, chromosomal rearrangement, or mutation) can be used as a diagnostic or prognostic marker.

[0294] Thus, the invention provides a method of detecting increased or decreased expression levels of the cancer polynucleotides in affected individuals as compared to unaffected individuals using polynucleotides of the present invention and techniques known in the art, including but not limited to the method described in Example 11. Any of these alterations (altered expression, chromosomal rearrangement, or mutation) can be used as a diagnostic or prognostic marker.

[0295] Thus, the invention also provides a diagnostic method useful during diagnosis of a tissue specific disorder, including cancer, involving measuring the expression level of cancer polynucleotides in tissues or other cells or body fluid from an individual and comparing the measured gene expression level with a standard cancer polynucleotide expression level, whereby an increase or decrease in the gene expression level compared to the standard is indicative of a tissue specific disorder.

[0296] In still another embodiment, the invention includes a kit for analyzing samples for the presence of proliferative and/or cancerous polynucleotides derived from a test subject. In a general embodiment, the kit includes at least one polynucleotide probe containing a nucleotide sequence that will specifically hybridize with a polynucleotide of the invention and a suitable container. In a specific embodiment, the kit includes two polynucleotide probes defining an internal region of the polynucleotide of the invention, where each probe has one strand containing a 31′mer-end internal to the region. In a further embodiment, the probes may be useful as primers for polymerase chain reaction amplification.

[0297] Where a diagnosis of a tissue specific disorder, including, for example, diagnosis of a tumor, has already been made according to conventional methods, the present invention is useful as a prognostic indicator, whereby patients exhibiting enhanced or depressed cancer polynucleotide expression will experience a worse clinical outcome relative to patients expressing the gene at a level nearer the standard level.

[0298] By “measuring the expression level of cancer polynucleotides” is intended qualitatively or quantitatively measuring or estimating the level of the cancer polypeptide or the level of the mRNA encoding the cancer polypeptide in a first biological sample either directly (e.g., by determining or estimating absolute protein level or mRNA level) or relatively (e.g., by comparing to the cancer polypeptide level or mRNA level in a second biological sample). Preferably, the cancer polypeptide level or MRNA level in the first biological sample is measured or estimated and compared to a standard cancer polypeptide level or mRNA level, the standard being taken from a second biological sample obtained from an individual not having the tissue specific disorder or being determined by averaging levels from a population of individuals not having the tissue specific disorder. As will be appreciated in the art, once a standard cancer polypeptide level or mRNA level is known, it can be used repeatedly as a standard for comparison.

[0299] By “biological sample” is intended any biological sample obtained from an individual, body fluid, cell line, tissue culture, or other source which contains a cancer polypeptide or the corresponding mRNA. As indicated, biological samples include body fluids (such as sputum, breast milk, vaginal pool, bile, semen, lymph, sera, plasma, urine, synovial fluid and spinal fluid) which contain the cancer polypeptide, and other tissue sources found to express the cancer polypeptide. Methods for obtaining tissue biopsies and body fluids from mammals are well known in the art. Where the biological sample is to include mRNA, a tissue biopsy is the preferred source.

[0300] The method(s) provided above may preferrably be applied in a diagnostic method and/or kits in which polynucleotides and/or polypeptides of the invention are attached to a solid support. In one exemplary method, the support may be a “gene chip” or a “biological chip” as described in U.S. Pat Nos. 5,837,832, 5,874,219, and 5,856,174. Further, such a gene chip with cancer antigen polynucleotides attached may be used to identify polymorphisms between the cancer antigen polynucleotide sequences, with polynucleotides isolated from a test subject. The knowledge of such polymorphisms (i.e. their location, as well as, their existence) would be beneficial in identifying disease loci for many disorders, such as for example, in neural disorders, immune system disorders, muscular disorders, reproductive disorders, gastrointestinal disorders, pulmonary disorders, cardiovascular disorders, renal disorders, proliferative disorders, and/or cancerous diseases and conditions. Such a method is described in U.S. Pat. Nos. 5,858,659 and 5,856,104. The U.S. patents referenced supra are hereby incorporated by reference in their entirety herein.

[0301] The present invention encompasses cancer polynucleotides that are chemically synthesized, or reproduced as peptide nucleic acids (PNA), or according to other methods known in the art. The use of PNAs would serve as the preferred form if the polynucleotides of the invention are incorporated onto a solid support, or gene chip. For the purposes of the present invention, a peptide nucleic acid (PNA) is a polyamide type of DNA analog and the monomeric units for adenine, guanine, thymine and cytosine are available commercially (Perceptive Biosystems). Certain components of DNA, such as phosphorus, phosphorus oxides, or deoxyribose derivatives, are not present in PNAs. As disclosed by P. E. Nielsen, M. Egholm, R. H. Berg and O. Buchardt, Science 254, 1497 (1991); and M. Egholm, O. Buchardt, L.Christensen, C. Behrens, S. M. Freier, D. A. Driver, R. H. Berg, S. K. Kim, B. Norden, and P. E. Nielsen, Nature 365, 666 (1993), PNAs bind specifically and tightly to complementary DNA strands and are not degraded by nucleases. In fact, PNA binds more strongly to DNA than DNA itself does. This is probably because there is no electrostatic repulsion between the two strands, and also the polyamide backbone is more flexible. Because of this, PNA/DNA duplexes bind under a wider range of stringency conditions than DNA/DNA duplexes, making it easier to perform multiplex hybridization. Smaller probes can be used than with DNA due to the strong binding. In addition, it is more likely that single base mismatches can be determined with PNA/DNA hybridization because a single mismatch in a PNA/DNA 15-mer lowers the melting point (T.sub.m) by 8°-20° C., vs. 4°-16° C. for the DNA/DNA 15-mer duplex. Also, the absence of charge groups in PNA means that hybridization can be done at low ionic strengths and reduce possible interference by salt during the analysis.

[0302] The present invention have uses which include, but are not limited to, detecting cancer in mammals. In particular the invention is useful during diagnosis of pathological cell proliferative neoplasias which include, but are not limited to: acute myelogenous leukemias including acute monocytic leukemia, acute myeloblastic leukemia, acute promyelocytic leukemia, acute myelomonocytic leukemia, acute erythroleukemia, acute megakaryocytic leukemia, and acute undifferentiated leukemia, etc.; and chronic myelogenous leukemias including chronic myelomonocytic leukemia, chronic granulocytic leukemia, etc. Preferred mammals include monkeys, apes, cats, dogs, cows, pigs, horses, rabbits and humans. Particularly preferred are humans.

[0303] Pathological cell proliferative disorders are often associated with inappropriate activation of proto-oncogenes. (Gelmann, E. P. et al., “The Etiology of Acute Leukemia: Molecular Genetics and Viral Oncology,” in Neoplastic Diseases of the Blood, Vol 1., Wiernik, P. H. et al. eds., 161-182 (1985)). Neoplasias are now believed to result from the qualitative alteration of a normal cellular gene product, or from the quantitative modification of gene expression by insertion into the chromosome of a viral sequence, by chromosomal translocation of a gene to a more actively transcribed region, or by some other mechanism. (Gelmann et al., supra) It is likely that mutated or altered expression of specific genes is involved in the pathogenesis of some leukemias, among other tissues and cell types. (Gelmann et al., supra) Indeed, the human counterparts of the oncogenes involved in some animal neoplasias have been amplified or translocated in some cases of human leukemia and carcinoma. (Gelmann et al., supra)

[0304] For example, c-myc expression is highly amplified in the non-lymphocytic leukemia cell line HL-60. When HL-60 cells are chemically induced to stop proliferation, the level of c-myc is found to be downregulated. (International Publication Number WO 91/15580). However, it has been shown that exposure of HL-60 cells to a DNA construct that is complementary to the 5′ end of c-myc or c-myb blocks translation of the corresponding mRNAs which downregulates expression of the c-myc or c-myb proteins and causes arrest of cell proliferation and differentiation of the treated cells. (International Publication Number WO 91/15580; Wickstrom et al., Proc. Natl. Acad. Sci. 85:1028 (1988); Anfossi et al., Proc. Natl. Acad. Sci. 86:3379 (1989)). However, the skilled artisan would appreciate the present invention's usefulness is not limited to treatment of proliferative disorders of hematopoietic cells and tissues, in light of the numerous cells and cell types of varying origins which are known to exhibit proliferative phenotypes.

[0305] In addition to the foregoing, a cancer antigen polynucleotide can be used to control gene expression through triple helix formation or through antisense DNA or RNA. Antisense techniques are discussed, for example, in Okano, J. Neurochem. 56: 560 (1991); “Oligodeoxynucleotides as Antisense Inhibitors of Gene Expression, CRC Press, Boca Raton, Fla. (1988). Triple helix formation is discussed in, for instance Lee et al., Nucleic Acids Research 6: 3073 (1979); Cooney et al., Science 241: 456 (1988); and Dervan et al., Science 251: 1360 (1991). Both methods rely on binding of the polynucleotide to a complementary DNA or RNA. For these techniques, preferred polynucleotides are usually oligonucleotides 20 to 40 bases in length and complementary to either the region of the gene involved in transcription (triple helix—see Lee et al., Nucl. Acids Res. 6:3073 (1979); Cooney et al., Science 241:456 (1988); and Dervan et al., Science 251:1360 (1991)) or to the mRNA itself (antisense—Okano, J. Neurochem. 56:560 (1991); Oligodeoxy-nucleotides as Antisense Inhibitors of Gene Expression, CRC Press, Boca Raton, Fla. (1988).) Triple helix formation optimally results in a shut-off of RNA transcription from DNA, while antisense RNA hybridization blocks translation of an mRNA molecule into polypeptide. The oligonucleotide described above can also be delivered to cells such that the antisense RNA or DNA may be expressed in vivo to inhibit production of polypeptide of the present invention antigens. Both techniques are effective in model systems, and the information disclosed herein can be used to design antisense or triple helix polynucleotides in an effort to treat disease, and in particular, for the treatment of proliferative diseases and/or conditions.

[0306] Polynucleotides of the present invention are also useful in gene therapy. One goal of gene therapy is to insert a normal gene into an organism having a defective gene, in an effort to correct the genetic defect. The polynucleotides disclosed in the present invention offer a means of targeting such genetic defects in a highly accurate manner. Another goal is to insert a new gene that was not present in the host genome, thereby producing a new trait in the host cell.

[0307] The polynucleotides are also useful for identifying individuals from minute biological samples. The United States military, for example, is considering the use of restriction fragment length polymorphism (RFLP) for identification of its personnel. In this technique, an individual's genomic DNA is digested with one or more restriction enzymes, and probed on a Southern blot to yield unique bands for identifying personnel. This method does not suffer from the current limitations of “Dog Tags” which can be lost, switched, or stolen, making positive identification difficult. The polynucleotides of the present invention can be used as additional DNA markers for RFLP.

[0308] The polynucleotides of the present invention can also be used as an alternative to RFLP, by determining the actual base-by-base DNA sequence of selected portions of an individual's genome. These sequences can be used to prepare PCR primers for amplifying and isolating such selected DNA, which can then be sequenced. Using this technique, individuals can be identified because each individual will have a unique set of DNA sequences. Once an unique ID database is established for an individual, positive identification of that individual, living or dead, can be made from extremely small tissue samples.

[0309] Forensic biology also benefits from using DNA-based identification techniques as disclosed herein. DNA sequences taken from very small biological samples such as tissues, e.g., hair or skin, or body fluids, e.g., blood, saliva, semen, synovial fluid, amniotic fluid, breast milk, lymph, pulmonary sputum or surfactant, urine, fecal matter, etc., can be amplified using PCR. In one prior art technique, gene sequences amplified from polymorphic loci, such as DQa class II HLA gene, are used in forensic biology to identify individuals. (Erlich, H., PCR Technology, Freeman and Co. (1992).) Once these specific polymorphic loci are amplified, they are digested with one or more restriction enzymes, yielding an identifying set of bands on a Southern blot probed with DNA corresponding to the DQa class II HLA gene. Similarly, polynucleotides of the present invention can be used as polymorphic markers for forensic purposes.

[0310] There is also a need for reagents capable of identifying the source of a particular tissue. Such need arises, for example, in forensics when presented with tissue of unknown origin. Appropriate reagents can comprise, for example, DNA probes or primers specific to cancer polynucleotides prepared from the sequences of the present invention. Panels of such reagents can identify tissue by species and/or by organ type. In a similar fashion, these reagents can be used to screen tissue cultures for contamination.

[0311] The polynucleotides of the present invention are also useful as hybridization probes for differential identification of the tissue(s) or cell type(s) present in a biological sample. Similarly, polypeptides and antibodies directed to polypeptides of the present invention are useful to provide immunological probes for differential identification of the tissue(s) (e.g., immunohistochemistry assays) or cell type(s) (e.g., immunocytochemistry assays). In addition, for a number of disorders of the above tissues or cells, significantly higher or lower levels of gene expression of the polynucleotideslpolypeptides of the present invention may be detected in certain tissues (e.g., tissues expressing polypeptides and/or polynucleotides of the present invention, cancer tissues and/or cancerous and/or wounded tissues) or bodily fluids (e.g., semen, vaginal pool, breast milk, bile, lymph, serum, plasma, urine, synovial fluid or spinal fluid) taken from an individual having such a disorder, relative to a “standard” gene expression level, i.e., the expression level in healthy tissue from an individual not having the disorder.

[0312] Thus, the invention provides a diagnostic method of a disorder, which involves: (a) assaying gene expression level in cells or body fluid of an individual; (b) comparing the gene expression level with a standard gene expression level, whereby an increase or decrease in the assayed gene expression level compared to the standard expression level is indicative of a disorder.

[0313] In the very least, the polynucleotides of the present invention can be used as molecular weight markers on Southern gels, as diagnostic probes for the presence of a specific MRNA in a particular cell type, as a probe to “subtract-out” known sequences in the process of discovering novel polynucleotides, for selecting and making oligomers for attachment to a “gene chip” or other support, to raise anti-DNA antibodies using DNA immunization techniques, and as an antigen to elicit an immune response.

[0314] Uses of the Polypeptides

[0315] Each of the polypeptides identified herein can be used in numerous ways. The following description should be considered exemplary and utilizes known techniques.

[0316] Polypeptides and antibodies directed to polypeptides of the present invention are useful to provide immunological probes for differential identification of the tissue(s) (e.g., immunohistochemistry assays such as, for example, ABC immunoperoxidase (Hsu et al., J. Histochem. Cytochem. 29:577-580 (1981)) or cell type(s) (e.g., immunocytochemistry assays).

[0317] Antibodies can be used to assay levels of polypeptides encoded by polynucleotides of the invention in a biological sample using classical immunohistological methods known to those of skill in the art (e.g., see Jalkanen, et al., J. Cell. Biol. 101:976-985 (1985); Jalkanen, et al., J. Cell. Biol. 105:3087-3096 (1987)). Other antibody-based methods useful for detecting protein gene expression include immunoassays, such as the enzyme linked immunosorbent assay (ELISA) and the radioimmunoassay (RIA). Suitable antibody assay labels are known in the art and include enzyme labels, such as, glucose oxidase; radioisotopes, such as iodine (¹³¹I, ¹²⁵I, ¹²³I, ¹²¹I), carbon (¹⁴C), sulfur (35S), tritium (3H), indium (^{115m}In, ¹¹³In, ¹¹²In, ¹¹¹In), and technetium (⁹⁹Tc, ^{99m}Tc), thallium (²⁰¹Ti), gallium (⁶⁸Ga, ⁶⁷Ga), palladium (¹⁰³Pd), molybdenum (⁹⁹Mo), xenon (¹³³Xe), fluorine (¹⁸F), ¹⁵³Sm, ¹⁷⁷Lu, ¹⁵⁹Gd, ¹⁴⁹Pm, ¹⁴⁰La, ¹⁷⁵Yb, ¹⁶⁶Ho, ⁹⁰Y, ⁴⁷Sc, ¹⁸⁶Re, ⁸⁸Re, ¹⁴²Pr, ¹⁰⁵Rh, ⁹⁷Ru; luminescent labels, such as luminol; and fluorescent labels, such as fluorescein and rhodamine, and biotin.

[0318] In addition to assaying levels of polypeptide of the present invention in a biological sample, proteins can also be detected in vivo by imaging. Antibody labels or markers for in vivo imaging of protein include those detectable by X-radiography, NMR or ESR. For X-radiography, suitable labels include radioisotopes such as barium or cesium, which emit detectable radiation but are not overtly harmful to the subject. Suitable markers for NMR and ESR include those with a detectable characteristic spin, such as deuterium, which may be incorporated into the antibody by labeling of nutrients for the relevant hybridoma.

[0319] A protein-specific antibody or antibody fragment which has been labeled with an appropriate detectable imaging moiety, such as a radioisotope (for example, ¹³¹I, 112In, ^{99m}Tc, (¹³¹I, ¹²⁵I, ¹²³I, ¹²¹I), carbon (¹⁴C), sulfur (³⁵S), tritium (³H), indium (^{115m}In, ^{113m}In, ¹¹²In, ¹¹¹In), and technetium (⁹⁹Tc, ^{99m}Tc), thallium (²⁰¹Ti), gallium (⁶⁸Ga, ⁶⁷Ga), palladium (¹⁰³Pd), molybdenum (⁹⁹Mo), xenon (¹³³Xe), fluorine (¹⁸F, ¹⁵³Sm, ¹⁷⁷Lu, ⁵⁹Gd, ¹⁴⁹Pm, ¹⁴⁰La, ¹⁷⁵Yb, ¹⁶⁶Ho, ⁹⁰Y, ⁴⁷Sc, ¹⁸⁶Re, ¹⁸⁸Re, ¹⁴²Pr, ¹⁰⁵Rh, ⁹⁷Ru), a radio-opaque substance, or a material detectable by nuclear magnetic resonance, is introduced (for example, parenterally, subcutaneously or intraperitoneally) into the mammal to be examined for immune system disorder. It will be understood in the art that the size of the subject and the imaging system used will determine the quantity of imaging moiety needed to produce diagnostic images. In the case of a radioisotope moiety, for a human subject, the quantity of radioactivity injected will normally range from about 5 to 20 millicuries of ^{99m}Tc. The labeled antibody or antibody fragment will then preferentially accumulate at the location of cells which express the polypeptide encoded by a polynucleotide of the invention. In vivo tumor imaging is described in S.W. Burchiel et al., “Immunopharmacokinetics of Radiolabeled Antibodies and Their Fragments” (Chapter 13 in Tumor Imaging: The Radiochemical Detection of Cancer, S. W. Burchiel and B. A. Rhodes, eds., Masson Publishing Inc. (1982)).

[0320] In one embodiment, the invention provides a method for the specific delivery of compositions of the invention to cells by administering polypeptides of the invention (e.g., polypeptides encoded by polynucleotides of the invention and/or antibodies) that are associated with heterologous polypeptides or nucleic acids. In one example, the invention provides a method for delivering a therapeutic protein into the targeted cell. In another example, the invention provides a method for delivering a single stranded nucleic acid (e.g., antisense or ribozymes) or double stranded nucleic acid (e.g., DNA that can integrate into the cell's genome or replicate episomally and that can be transcribed) into the targeted cell.

[0321] In another embodiment, the invention provides a method for the specific destruction of cells (e.g., the destruction of tumor cells) by administering polypeptides of the invention in association with toxins or cytotoxic prodrugs.

[0322] By “toxin” is meant one or more compounds that bind and activate endogenous cytotoxic effector systems, radioisotopes, holotoxins, modified toxins, catalytic subunits of toxins, or any molecules or enzymes not normally present in or on the surface of a cell that under defined conditions cause the cell's death. Toxins that may be used according to the methods of the invention include, but are not limited to, radioisotopes known in the art, compounds such as, for example, antibodies (or complement fixing containing portions thereof) that bind an inherent or induced endogenous cytotoxic effector system, thymidine kinase, endonuclease, RNAse, alpha toxin, ricin, abrin, Pseudomonas exotoxin A, diphtheria toxin, saporin, momordin, gelonin, pokeweed antiviral protein, alpha-sarcin and cholera toxin. “Toxin” also includes a cytostatic or cytocidal agent, a therapeutic agent or a radioactive metal ion, e.g., alpha-emitters such as, for example, ²¹³Bi, or other radioisotopes such as, for example, ¹⁰³Pd, ¹³³Xe, ¹³¹I, ⁶⁸Ge, ⁵⁷Co, ⁶⁵Zn, ⁸⁵Sr, ³²P, ³⁵S, ⁹⁰Y, ¹⁵³Sm, ¹⁵³Gd, ¹⁶⁹Yb , ⁵¹Cr, ⁵⁴Mn, ⁷⁵Se, ¹¹³Sn, ⁹⁰Yttrium, ¹¹⁷Tin, ¹⁸⁶Rhenium, 166Holmium, and ¹⁸⁸Rhenium; luminescent labels, such as luminol; and fluorescent labels, such as fluorescein and rhodamine, and biotin.

[0323] Techniques known in the art may be applied to label polypeptides of the invention (including antibodies). Such techniques include, but are not limited to, the use of bifunctional conjugating agents (see e.g., U.S. Pat. Nos. 5,756,065; 5,714,631; 5,696,239; 5,652,361; 5,505,931; 5,489,425; 5,435,990; 5,428,139; 5,342,604; 5,274,119; 4,994,560; and 5,808,003; the contents of each of which are hereby incorporated by reference in its entirety).

[0324] Thus, the invention provides a diagnostic method of a disorder, which involves (a) assaying the expression level of a cancer polypeptide of the present invention in cells or body fluid of an individual; and (b) comparing the assayed polypeptide expression level with a standard polypeptide expression level, whereby an increase or decrease in the assayed polypeptide expression level compared to the standard expression level is indicative of a disorder. With respect to cancer, the presence of a relatively high amount of transcript in biopsied tissue from an individual may indicate a predisposition for the development of the disease, or may provide a means for detecting the disease prior to the appearance of actual clinical symptoms. A more definitive diagnosis of this type may allow health professionals to employ preventative measures or aggressive treatment earlier thereby preventing the development or further progression of the cancer.

[0325] Moreover, cancer antigen polypeptides of the present invention can be used to treat or prevent diseases or conditions such as, for example, neural disorders, immune system disorders, muscular disorders, reproductive disorders, gastrointestinal disorders, pulmonary disorders, cardiovascular disorders, renal disorders, proliferative disorders, and/or cancerous diseases and conditions. For example, patients can be administered a polypeptide of the present invention in an effort to replace absent or decreased levels of the polypeptide (e.g., insulin), to supplement absent or decreased levels of a different polypeptide (e.g., hemoglobin S for hemoglobin B, SOD, catalase, DNA repair proteins), to inhibit the activity of a polypeptide (e.g., an oncogene or tumor supressor), to activate the activity of a polypeptide (e.g., by binding to a receptor), to reduce the activity of a membrane bound receptor by competing with it for free ligand (e.g., soluble TNF receptors used in reducing inflammation), or to bring about a desired response (e.g., blood vessel growth inhibition, enhancement of the immune response to proliferative cells or tissues).

[0326] Similarly, antibodies directed to a polypeptide of the present invention can also be used to treat disease (as described supra, and elsewhere herein). For example, administration of an antibody directed to a polypeptide of the present invention can bind, and/or neutralize the polypeptide, and/or reduce overproduction of the polypeptide. Similarly, administration of an antibody can activate the polypeptide, such as by binding to a polypeptide bound to a membrane (receptor).

[0327] At the very least, the polypeptides of the present invention can be used as molecular weight markers on SDS-PAGE gels or on molecular sieve gel filtration columns using methods well known to those of skill in the art. Polypeptides can also be used to raise antibodies, which in turn are used to measure protein expression from a recombinant cell, as a way of assessing transformation of the host cell. Moreover, the polypeptides of the present invention can be used to test the following biological activities.

[0328] Diagnostic Assays

[0329] The compounds of the present invention are useful for diagnosis, treatment, prevention and/or prognosis of cancer disorders in mammals, preferably humans. Such disorders include, but are not limited to, cancer, neoplasms, tumors and/or as described under “Hyperproliferative Disorders” below. In preferred embodiments, polynucleotides expressed in a particular tissue type (see, e.g., Table 1, column 10) are used to diagnose, detect, prevent, treat and/or prognose disorders associated with the tissue type.

[0330] Cancer antigens are expressed in the tissues as shown in column 10 of Table 1. For a number of cancer related disorders, substantially altered (increased or decreased) levels of cancer antigen gene expression can be detected in tissue or other cells or bodily fluids (e.g., sera, plasma, urine, semen, synovial fluid or spinal fluid) taken from an individual having such a disorder, relative to a “standard” cancer antigen gene expression level, that is, the cancer antigen expression level in tissues or bodily fluids from an individual not having the disorder. Thus, the invention provides a diagnostic method useful during diagnosis of a disorder, which involves measuring the expression level of the gene encoding the cancer associated polypeptide in tissue or other cells or body fluid from an individual and comparing the measured gene expression level with a standard cancer antigens gene expression level, whereby an increase or decrease in the gene expression level(s) compared to the standard is indicative of an disorder.

[0331] In specific embodiments, the invention provides a diagnostic method useful during diagnosis of a disorder of a normal or diseased tissue/cell source corresponding to column 10 of Table 1, which involves measuring the expression level of the coding sequence of a polynucleotide sequence associated with this tissue/cell source as disclosed in Table 1 in the tissue/cell source or other cells or body fluid from an individual and comparing the expression level of the coding sequence with a standard expression level of the coding sequence of a polynucleotide sequence, whereby an increase or decrease in the gene expression level(s) compared to the standard is indicative of a disorder of a normal or diseased tissue/cell source corresponding to column 10 of Table 1.

[0332] In particular, it is believed that certain tissues in mammals with cancer express significantly enhanced or reduced levels of normal or altered cancer antigen expression and mRNA encoding the cancer associated polypeptide when compared to a corresponding “standard” level. Further, it is believed that enhanced or depressed levels of the cancer associated polypeptide can be detected in certain body fluids (e.g., sera, plasma, urine, and spinal fluid) or cells or tissue from mammals with such a cancer when compared to sera from mammals of the same species not having the cancer.

[0333] For example, as disclosed herein, cancer associated polypeptides of the invention are expressed in tissues as described in column 10 of the corresponding row of Table 1. Accordingly, polynucleotides of the invention (e.g., polynucleotide sequences complementary to all or a portion of a cancer antigen mRNA nucleotide sequence of SEQ ID NO:X, the nucleotide coding sequence of the related cDNA contained in a deposited library, a nucleotide sequence encoding SEQ ID NO:Y, a nucleotide sequence encoding a polypeptide encoded by SEQ ID NO:X, the nucleotide sequence encoding the polypeptide encoded by the cDNA in the related cDNA contained in a deposited library, polynucleotide fragments of any of these nucleic acid molecules (e.g., those fragments described herein), and/or antibodies (and antibody fragments) directed against the polypeptides of the invention may be used to quantitate or qualitate concentrations of cells expressing cancer antigens, preferrably on their cell surfaces. These polynucleotides and antibodies additionally have diagnostic applications in detecting abnormalities in the level of cancer antigens gene expression, or abnormalities in the structure and/or temporal, tissue, cellular, or subcellular location of cancer antigens. These diagnostic assays may be performed in vivo or in vitro, such as, for example, on blood samples, biopsy tissue or autopsy tissue.

[0334] Thus, the invention provides a diagnostic method useful during diagnosis of a cancers, which involves measuring the expression level of the gene encoding the cancer antigen polypeptide in tissue or other cells or body fluid from an individual and comparing the measured gene expression level with a standard cancer antigen gene expression level, whereby an increase or decrease in the gene expression level compared to the standard is indicative of a disorder.

[0335] Where a diagnosis of a disorder, including diagnosis of a tumor, has already been made according to conventional methods, the present invention is useful as a prognostic indicator, whereby patients exhibiting enhanced or depressed cancer antigen gene expression will experience a worse clinical outcome relative to patients expressing the gene at a level nearer the standard level.

[0336] By “assaying the expression level of the gene encoding the cancer associated polypeptide” is intended qualitatively or quantitatively measuring or estimating the level of the cancer antigen polypeptide or the level of the MRNA encoding the cancer antigen polypeptide in a first biological sample either directly (e.g., by determining or estimating absolute protein level or mRNA level) or relatively (e.g., by comparing to the cancer associated polypeptide level or mRNA level in a second biological sample). Preferably, the cancer antigen polypeptide expression level or MRNA level in the first biological sample is measured or estimated and compared to a standard cancer antigen polypeptide level or mRNA level, the standard being taken from a second biological sample obtained from an individual not having the disorder or being determined by averaging levels from a population of individuals not having the disorder. As will be appreciated in the art, once a standard cancer antigen polypeptide level or niRNA level is known, it can be used repeatedly as a standard for comparison.

[0337] By “biological sample” is intended any biological sample obtained from an individual, cell line, tissue culture, or other source containing cancer antigen polypeptides (including portions thereof) or mRNA. As indicated, biological samples include body fluids (such as sera, plasma, urine, synovial fluid and spinal fluid) which contain cells expressing cancer antigen polypeptides, tissues as shown in column 10 of Table 1, and other tissue sources found to express the full length or fragments thereof of a cancer antigen. Methods for obtaining tissue biopsies and body fluids from mammals are well known in the art. Where the biological sample is to include mRNA, a tissue biopsy is the preferred source.

[0338] Total cellular RNA can be isolated from a biological sample using any suitable technique such as the single-step guanidinium-thiocyanate-phenol-chloroform method described in Chomczynski and Sacchi, Anal. Biochem. 162:156-159 (1987). Levels of mRNA encoding the cancer antigen polypeptides are then assayed using any appropriate method. These include Northern blot analysis, S1 nuclease mapping, the polymerase chain reaction (PCR), reverse transcription in combination with the polymerase chain reaction (RT-PCR), and reverse transcription in combination with the ligase chain reaction (RT-LCR).

[0339] The present invention also relates to diagnostic assays such as quantitative and diagnostic assays for detecting levels of cancer antigen polypeptides, in a biological sample (e.g., cells and tissues), including determination of normal and abnormal levels of polypeptides. Thus, for instance, a diagnostic assay in accordance with the invention for detecting over-expression of cancer antigens compared to normal control tissue samples may be used to detect the presence of tumors. Assay techniques that can be used to determine levels of a polypeptide, such as a cancer antigen polypeptide of the present invention in a sample derived from a host are well-known to those of skill in the art. Such assay methods include radioimmunoassays, competitive-binding assays, Western Blot analysis and ELISA assays. Assaying cancer antigen polypeptide levels in a biological sample can occur using any art-known method.

[0340] Assaying cancer antigen polypeptide levels in a biological sample can occur using antibody-based techniques. For example, cancer antigen polypeptide expression in tissues can be studied with classical immunohistological methods (Jalkanen et al., J. Cell. Biol. 101:976-985 (1985); Jalkanen, M., et al., J. Cell . Biol. 105:3087-3096 (1987)). Other antibody-based methods useful for detecting cancer antigen polypeptide gene expression include immunoassays, such as the enzyme linked immunosorbent assay (ELISA) and the radioimmunoassay (RIA). Suitable antibody assay labels are known in the art and include enzyme labels, such as, glucose oxidase, and radioisotopes, such as iodine (¹²⁵I, ¹²¹I), carbon (¹⁴C), sulfur (³⁵S), tritium (³H), indium (¹¹²In), and technetium (^{99m}Tc), and fluorescent labels, such as fluorescein and rhodamine, and biotin.

[0341] The tissue or cell type to be analyzed will generally include those which are known, or suspected, to express the cancer antigen gene (such as, for example, cells of cancers in tissues as shown in column 10 of Table 1). The protein isolation methods employed herein may, for example, be such as those described in Harlow and Lane (Harlow, E. and Lane, D., 1988, “Antibodies: A Laboratory Manual”, Cold Spring Harbor Laboratory Press, Cold Spring Harbor, New York), which is incorporated herein by reference in its entirety. The isolated cells can be derived from cell culture or from a patient. The analysis of cells taken from culture may be a necessary step in the assessment of cells that could be used as part of a cell-based gene therapy technique or, alternatively, to test the effect of compounds on the expression of the cancer antigen gene.

[0342] For example, antibodies, or fragments of antibodies, such as those described herein, may be used to quantitatively or qualitatively detect the presence of cancer antigen gene products or conserved variants or peptide fragments thereof. This can be accomplished, for example, by immunofluorescence techniques employing a fluorescently labeled antibody coupled with light microscopic, flow cytometric, or fluorimetric detection.

[0343] In a preferred embodiment, antibodies, or fragments of antibodies directed to any one or all of the predicted epitope domains of the cancer antigen polypeptides (Shown in Table 4) may be used to quantitatively or qualitatively detect the presence of cancer antigen gene products or conserved variants or peptide fragments thereof. This can be accomplished, for example, by immunofluorescence techniques employing a fluorescently labeled antibody coupled with light microscopic, flow cytometric, or fluorimetric detection.

[0344] In an additional preferred embodiment, antibodies, or fragments of antibodies directed to a conformational epitope of a cancer antigen may be used to quantitatively or qualitatively detect the presence of cancer antigen gene products or conserved variants or peptide fragments thereof. This can be accomplished, for example, by immunofluorescence techniques employing a fluorescently labeled antibody coupled with light microscopic, flow cytometric, or fluorimetric detection.

[0345] The antibodies (or fragments thereof), and/or cancer antigen polypeptides of the present invention may, additionally, be employed histologically, as in immunofluorescence, immunoelectron microscopy or non-immunological assays, for in situ detection of cancer antigen gene products or conserved variants or peptide fragments thereof. In situ detection may be accomplished by removing a histological specimen from a patient, and applying thereto a labeled antibody or cancer antigen polypeptide of the present invention. The antibody (or fragment thereof) or cancer antigen polypeptide is preferably applied by overlaying the labeled antibody (or fragment) onto a biological sample. Through the use of such a procedure, it is possible to determine not only the presence of the cancer antigen gene product, or conserved variants or peptide fragments, or cancer antigen polypeptide binding, but also its distribution in the examined tissue. Using the present invention, those of ordinary skill will readily perceive that any of a wide variety of histological methods (such as staining procedures) can be modified in order to achieve such in situ detection.

[0346] Immunoassays and non-immunoassays for cancer antigen gene products or conserved variants or peptide fragments thereof will typically comprise incubating a sample, such as a biological fluid, a tissue extract, freshly harvested cells, or lysates of cells which have been incubated in cell culture, in the presence of a detectably labeled antibody capable of binding cancer antigen gene products or conserved variants or peptide fragments thereof, and detecting the bound antibody by any of a number of techniques well-known in the art.

[0347] The biological sample may be brought in contact with and immobilized onto a solid phase support or carrier such as nitrocellulose, or other solid support which is capable of immobilizing cells, cell particles or soluble proteins. The support may then be washed with suitable buffers followed by treatment with the detectably labeled anti-cancer antigen antibody or detectable cancer antigen polypeptide. The solid phase support may then be washed with the buffer a second time to remove unbound antibody or polypeptide. Optionally the antibody is subsequently labeled. The amount of bound label on solid support may then be detected by conventional means.

[0348] By “solid phase support or carrier” is intended any support capable of binding an antigen or an antibody. Well-known supports or carriers include glass, polystyrene, polypropylene, polyethylene, dextran, nylon, amylases, natural and modified celluloses, polyacrylamides, gabbros, and magnetite. The nature of the carrier can be either soluble to some extent or insoluble for the purposes of the present invention. The support material may have virtually any possible structural configuration so long as the coupled molecule is capable of binding to an antigen or antibody. Thus, the support configuration may be spherical, as in a bead, or cylindrical, as in the inside surface of a test tube, or the external surface of a rod. Alternatively, the surface may be flat such as a sheet, test strip, etc. Preferred supports include polystyrene beads. Those skilled in the art will know many other suitable carriers for binding antibody or antigen, or will be able to ascertain the same by use of routine experimentation.

[0349] The binding activity of a given lot of anti-cancer antigen antibody or cancer antigen polypeptide may be determined according to well known methods. Those skilled in the art will be able to determine operative and optimal assay conditions for each determination by employing routine experimentation.

[0350] In addition to assaying cancer antigen polypeptide levels or polynucleotide levels in a biological sample obtained from an individual, cancer antigen polypeptide or polynucleotide can also be detected in vivo by imaging. For example, in one embodiment of the invention, cancer antigen polypeptide and/or anti-cancer antigen antibodies are used to image diseased cells, such as neoplasms. In another embodiment, cancer antigen polynucleotides of the invention (e.g., polynucleotides complementary to all or a portion of cancer antigen mRNA) and/or anti-cancer antigen antibodies (e.g., antibodies directed to any one or a combination of the epitopes of cancer antigens, antibodies directed to a conformational epitope of cancer antigens, antibodies directed to the full length polypeptide expressed on the cell surface of a mammalian cell) are used to image diseased or neoplastic cells.

[0351] Antibody labels or markers for in vivo imaging of cancer antigen polypeptides include those detectable by X-radiography, NMR, MRI, CAT-scans or ESR. For X-radiography, suitable labels include radioisotopes such as barium or cesium, which emit detectable radiation but are not overtly harmful to the subject. Suitable markers for NMR and ESR include those with a detectable characteristic spin, such as deuterium, which may be incorporated into the antibody by labeling of nutrients for the relevant hybridoma. Where in vivo imaging is used to detect enhanced levels of cancer antigen polypeptides for diagnosis in humans, it may be preferable to use human antibodies or “humanized” chimeric monoclonal antibodies. Such antibodies can be produced using techniques described herein or otherwise known in the art. For example methods for producing chimeric antibodies are known in the art. See, for review, Morrison, Science 229:1202 (1985); Oi et al., BioTechniques 4:214 (1986); Cabilly et al., U.S. Pat. No. 4,816,567; Taniguchi et al., EP 171496; Morrison et al., EP 173494; Neuberger et al., WO 8601533; Robinson et al., WO 8702671; Boulianne et al., Nature 312:643 (1984); Neuberger et al., Nature 314:268 (1985).

[0352] Additionally, any cancer antigen polypeptides whose presence can be detected, can be administered. For example, cancer antigen polypeptides labeled with a radio-opaque or other appropriate compound can be administered and visualized in vivo, as discussed, above for labeled antibodies. Further such cancer antigen polypeptides can be utilized for in vitro diagnostic procedures.

[0353] A cancer antigen polypeptide-specific antibody or antibody fragment which has been labeled with an appropriate detectable imaging moiety, such as a radioisotope (for example, ¹³¹I, ¹¹²In, ^{99m}Tc), a radio-opaque substance, or a material detectable by nuclear magnetic resonance, is introduced (for example, parenterally, subcutaneously or intraperitoneally) into the mammal to be examined for a disorder. It will be understood in the art that the size of the subject and the imaging system used will determine the quantity of imaging moiety needed to produce diagnostic images. In the case of a radioisotope moiety, for a human subject, the quantity of radioactivity injected will normally range from about 5 to 20 millicuries of ^{99m}Tc. The labeled antibody or antibody fragment will then preferentially accumulate at the location of cells which contain cancer antigen protein. In vivo tumor imaging is described in S. W. Burchiel et al., “Immunopharmacokinetics of Radiolabeled Antibodies and Their Fragments” (Chapter 13 in Tumor Imaging: The Radiochemical Detection of Cancer, S. W. Burchiel and B. A. Rhodes, eds., Masson Publishing Inc. (1982)).

[0354] With respect to antibodies, one of the ways in which the anti-cancer antigen antibody can be detectably labeled is by linking the same to an enzyme and using the linked product in an enzyme immunoassay (EIA) (Voller, A., “The Enzyme Linked Immunosorbent Assay (ELISA)”, 1978, Diagnostic Horizons 2:1-7, Microbiological Associates Quarterly Publication, Walkersville, Md.); Voller et al., J. Clin. Pathol. 31:507-520 (1978); Butler, J. E., Meth. Enrymol. 73:482-523 (1981); Maggio, E. (ed.), 1980, Enzyme Immunoassay, CRC Press, Boca Raton, Fla.,; Ishikawa, E. et al., (eds.), 1981, Enzyme Immunoassay, Kgaku Shoin, Tokyo). The enzyme, which is bound to the antibody will react with an appropriate substrate, preferably a chromogenic substrate, in such a manner as to produce a chemical moiety which can be detected, for example, by spectrophotometric, fluorimetric or by visual means. Enzymes which can be used to detectably label the antibody include, but are not limited to, malate dehydrogenase, staphylococcal nuclease, delta-5-steroid isomerase, yeast alcohol dehydrogenase, alpha-glycerophosphate, dehydrogenase, triose phosphate isomerase, horseradish peroxidase, alkaline phosphatase, asparaginase, glucose oxidase, beta-galactosidase, ribonuclease, urease, catalase, glucose-6-phosphate dehydrogenase, glucoamylase and acetylcholinesterase. Additionally, the detection can be accomplished by colorimetric methods which employ a chromogenic substrate for the enzyme. Detection may also be accomplished by visual comparison of the extent of enzymatic reaction of a substrate in comparison with similarly prepared standards.

[0355] Detection may also be accomplished using any of a variety of other immunoassays. For example, by radioactively labeling the antibodies or antibody fragments, it is possible to detect cancer antigens through the use of a radioimmunoassay (RIA) (see, for example, Weintraub, B., Principles of Radioimmunoassays, Seventh Training Course on Radioligand Assay Techniques, The Endocrine Society, March, 1986, which is incorporated by reference herein). The radioactive isotope can be detected by means including, but not limited to, a gamma counter, a scintillation counter, or autoradiography.

[0356] It is also possible to label the antibody with a fluorescent compound. When the fluorescently labeled antibody is exposed to light of the proper wave length, its presence can then be detected due to fluorescence. Among the most commonly used fluorescent labeling compounds are fluorescein isothiocyanate, rhodamine, phycoerythrin, phycocyanin, allophycocyanin, ophthaldehyde and fluorescamine.

[0357] The antibody can also be detectably labeled using fluorescence emitting metals such as ¹⁵²Eu, or others of the lanthanide series. These metals can be attached to the antibody using such metal chelating groups as diethylenetriaminepentacetic acid (DTPA) or ethylenediaminetetraacetic acid (EDTA).

[0358] The antibody also can be detectably labeled by coupling it to a chemiluminescent compound. The presence of the chemiluminescent-tagged antibody is then determined by detecting the presence of luminescence that arises during the course of a chemical reaction. Examples of particularly useful chemiluminescent labeling compounds are luminol, isoluminol, theromatic acridinium ester, imidazole, acridinium salt and oxalate ester.

[0359] Likewise, a bioluminescent compound may be used to label the antibody of the present invention. Bioluminescence is a type of chemiluminescence found in biological systems in, which a catalytic protein increases the efficiency of the chemiluminescent reaction. The presence of a bioluminescent protein is determined by detecting the presence of luminescence. Important bioluminescent compounds for purposes of labeling are luciferin, luciferase and aequorin.

[0360] Methods for Detecting Disease Cancer

[0361] In general, cancer may be detected in a patient based on the presence of one or more cancer antigen proteins of the invention and/or polynucleotides encoding such proteins in a biological sample (for example, blood, sera, urine, and/or tumor biopsies) obtained from the patient. In other words, such proteins and/or polynucleotides may be used as markers to indicate the presence or absence of cancer. Cancers that may be diagnosed, and/or prognosed using the compositions of the invention include but are not limited to, colorectal cancer, breast cancer, ovarian cancer, prostate cancer, pancreatic cancer, lung cancer, liver cancer, uterine cancer, and/or skin cancer. The binding agents provided herein generally permit detection of the level of antigen that binds to the agent in the biological sample. Polynucleotide primers and probes may be used to detect the level of MRNA encoding cancer antigen polypeptides, which is also indicative of the presence or absence of cancer. In general, cancer antigen polypeptides should be present at a level that is at least three fold higher in diseased tissue than in normal tissue.

[0362] There are a variety of assay formats known to those of ordinary skill in the art for using a binding agent to detect polypeptide markers in a sample. See, e.g., Harlow and Lane, supra. In general, the presence or absence of a disease in a patient may be determined by (a) contacting a biological sample obtained from a patient with a binding agent; (b) detecting in the sample a level of polypeptide that binds to the binding agent; and (c) comparing the level of polypeptide with a predetermined cut-off value.

[0363] In a preferred embodiment, the assay involves the use of binding agent immobilized on a solid support to bind to and remove the cancer antigen polypeptide of the invention from the remainder of the sample. The bound polypeptide may then be detected using a detection reagent that contains a reporter group and specifically binds to the binding agent/polypeptide complex. Such detection reagents may comprise, for example, a binding agent that specifically binds to the polypeptide or an antibody or other agent that specifically binds to the binding agent, such as an anti-immunoglobulin, protein G, protein A or a lectin. Alternatively, a competitive assay may be utilized, in which a polypeptide is labeled with a reporter group and allowed to bind to the immobilized binding agent after incubation of the binding agent with the sample. The extent to which components of the sample inhibit the binding of the labeled polypeptide to the binding agent is indicative of the reactivity of the sample with the immobilized binding agent. Suitable polypeptides for use within such assays include cancer antigen polypeptides and portions thereof, or antibodies, to which the binding agent binds, as described above.

[0364] The solid support may be any material known to those of skill in the art to which cancer antigen polypeptides of the invention may be attached. For example, the solid support may be a test well in a microtiter plate or a nitrocellulose or other suitable membrane. Alternatively, the support may be a bead or disc, such as glass fiberglass, latex or a plastic material such as polystyrene or polyvinylchloride. The support may also be a magnetic particle or a fiber optic sensor, such as those disclosed, for example, in U.S. Pat. No. 5,359,681. The binding agent may be immobilized on the solid support using a variety of techniques known to those of skill in the art, which are amply described in the patent and scientific literature. In the context of the present invention, the term “immobilization” refers to both noncovalent association, such as adsorption, and covalent attachment (which may be a direct linkage between the agent and functional groups on the support or may be a linkage by way of a cross-linking agent). Immobilization by adsorption to a well in a microtiter plate or to a membrane is preferred. In such cases, adsorption may be achieved by contacting the binding agent, in a suitable buffer, with the solid support for the suitable amount of time. The contact time varies with temperature, but is typically between about 1 hour and about 1 day. In general, contacting a well of plastic microtiter plate (such as polystyrene or polyvinylchloride) with an amount of binding agent ranging from about 10 ng to about 10 ug, and preferably about 100 ng to about 1 ug, is sufficient to immobilize an adequate amount of binding agent.

[0365] Covalent attachment of binding agent to a solid support may generally be achieved by first reacting the support with a bifunctional reagent that will react with both the support and a functional group, such as a hydroxyl or amino group, on the binding agent. For example, the binding agent may be covalently attached to supports having an appropriate polymer coating using benzoquinone or by condensation of an aldehyde group on the support with an amine and an active hydrogen on the binding partner (see, e.g., Pierce Immunotechnology Catalog and Handbook, 1991, at A12-A13).

[0366] Gene Therapy Methods

[0367] Another aspect of the present invention is to gene therapy methods for treating or preventing disorders, diseases and conditions. The gene therapy methods relate to the introduction of nucleic acid (DNA, RNA and antisense DNA or RNA) sequences into an animal to achieve expression of the polypeptide of the present invention. This method requires a polynucleotide which codes for a polypeptide of the present invention operatively linked to a promoter and any other genetic elements necessary for the expression of the polypeptide by the target tissue. Such gene therapy and delivery techniques are known in the art, see, for example, WO90/11092, which is herein incorporated by reference.

[0368] Thus, for example, cells from a patient may be engineered with a polynucleotide (DNA or RNA) comprising a promoter operably linked to a polynucleotide of the present invention ex vivo, with the engineered cells then being provided to a patient to be treated with the polypeptide of the present invention. Such methods are well-known in the art. For example, see Belldegrun, A., et al., J. Natl. Cancer Inst. 85: 207-216 (1993); Ferrantini, M. et al., Cancer Research 53: 1107-1112 (1993); Ferrantini, M. et al., J. Immunology 153: 4604-4615 (1994); Kaido, T., et al., Int. J. Cancer 60: 221-229 (1995); Ogura, H., et al., Cancer Research 50: 5102-5106 (1990); Santodonato, L., et al., Human Gene Therapy 7:1-10 (1996); Santodonato, L., et al., Gene Therapy 4:1246-1255 (1997); and Zhang, J. -F. et al., Cancer Gene Therapy 3: 31-38 (1996)), which are herein incorporated by reference. In one embodiment, the cells which are engineered are arterial cells. The arterial cells may be reintroduced into the patient through direct injection to the artery, the tissues surrounding the artery, or through catheter injection.

[0369] As discussed in more detail below, the polynucleotide constructs can be delivered by any method that delivers injectable materials to the cells of an animal, such as, injection into the interstitial space of tissues (heart, muscle, skin, lung, liver, and the like). The polynucleotide constructs may be delivered in a pharmaceutically acceptable liquid or aqueous carrier.

[0370] In one embodiment, the polynucleotide of the present invention is delivered as a naked polynucleotide. The term “naked” polynucleotide, DNA or RNA refers to sequences that are free from any delivery vehicle that acts to assist, promote or facilitate entry into the cell, including viral sequences, viral particles, liposome formulations, lipofectin or precipitating agents and the like. However, the polynucleotide of the present invention can also be delivered in liposome formulations and lipofectin formulations and the like can be prepared by methods well known to those skilled in the art. Such methods are described, for example, in U.S. Pat. Nos. 5,593,972, 5,589,466, and 5,580,859, which are herein incorporated by reference.

[0371] The polynucleotide vector constructs used in the gene therapy method are preferably constructs that will not integrate into the host genome nor will they contain sequences that allow for replication. Appropriate vectors include pWLNEO, pSV2CAT, pOG44, pXT1 and pSG available from Stratagene; pSVK3, pBPV, pMSG and pSVL available from Pharmacia; and pEF1/V5, pcDNA3.1, and pRc/CMV2 available from Invitrogen. Other suitable vectors will be readily apparent to the skilled artisan.

[0372] Any strong promoter known to those skilled in the art can be used for driving the expression of the polynucleotide sequence. Suitable promoters include adenoviral promoters, such as the adenoviral major late promoter; or heterologous promoters, such as the cytomegalovirus (CMV) promoter; the respiratory syncytial virus (RSV) promoter; inducible promoters, such as the MMT promoter, the metallothionein promoter; heat shock promoters; the albumin promoter; the ApoAl promoter; human globin promoters; viral thymidine kinase promoters, such as the Herpes Simplex thymidine kinase promoter; retroviral LTRs; the b-actin promoter; and human growth hormone promoters. The promoter also may be the native promoter for the polynucleotide of the present invention.

[0373] Unlike other gene therapy techniques, one major advantage of introducing naked nucleic acid sequences into target cells is the transitory nature of the polynucleotide synthesis in the cells. Studies have shown that non-replicating DNA sequences can be introduced into cells to provide production of the desired polypeptide for periods of up to six months.

[0374] The polynucleotide construct can be delivered to the interstitial space of tissues within the an animal, including of muscle, skin, brain, lung, liver, spleen, bone marrow, thymus, heart, lymph, blood, bone, cartilage, pancreas, kidney, gall bladder, stomach, intestine, testis, ovary, uterus, rectum, nervous system, eye, gland, and connective tissue. Interstitial space of the tissues comprises the intercellular, fluid, mucopolysaccharide matrix among the reticular fibers of organ tissues, elastic fibers in the walls of vessels or chambers, collagen fibers of fibrous tissues, or that same matrix within connective tissue ensheathing muscle cells or in the lacunae of bone. It is similarly the space occupied by the plasma of the circulation and the lymph fluid of the lymphatic channels. Delivery to the interstitial space of muscle tissue is preferred for the reasons discussed below. They may be conveniently delivered by injection into the tissues comprising these cells. They are preferably delivered to and expressed in persistent, non-dividing cells which are differentiated, although delivery and expression may be achieved in non-differentiated or less completely differentiated cells, such as, for example, stem cells of blood or skin fibroblasts. In vivo muscle cells are particularly competent in their ability to take up and express polynucleotides.

[0375] For the naked nucleic acid sequence injection, an effective dosage amount of DNA or RNA will be in the range of from about 0.05 mg/kg body weight to about 50 mg/kg body weight. Preferably the dosage will be from about 0.005 mg/kg to about 20 mg/kg and more preferably from about 0.05 mg/kg to about 5 mg/kg. Of course, as the artisan of ordinary skill will appreciate, this dosage will vary according to the tissue site of injection. The appropriate and effective dosage of nucleic acid sequence can readily be determined by those of ordinary skill in the art and may depend on the condition being treated and the route of administration.

[0376] The preferred route of administration is by the parenteral route of injection into the interstitial space of tissues. However, other parenteral routes may also be used, such as, inhalation of an aerosol formulation particularly for delivery to lungs or bronchial tissues, throat or mucous membranes of the nose. In addition, naked DNA constructs can be delivered to arteries during angioplasty by the catheter used in the procedure.

[0377] The naked polynucleotides are delivered by any method known in the art, including, but not limited to, direct needle injection at the delivery site, intravenous injection, topical administration, catheter infusion, and so-called “gene guns”. These delivery methods are known in the art.

[0378] The constructs may also be delivered with delivery vehicles such as viral sequences, viral particles, liposome formulations, lipofectin, precipitating agents, etc. Such methods of delivery are known in the art.

[0379] In certain embodiments, the polynucleotide constructs are complexed in a liposome preparation. Liposomal preparations for use in the instant invention include cationic (positively charged), anionic (negatively charged) and neutral preparations. However, cationic liposomes are particularly preferred because a tight charge complex can be formed between the cationic liposome and the polyanionic nucleic acid. Cationic liposomes have been shown to mediate intracellular delivery of plasmid DNA (Felgner et al., Proc. Natl. Acad. Sci. USA (1987) 84:7413-7416, which is herein incorporated by reference); mRNA (Malone et al., Proc. Natl. Acad. Sci. USA (1989) 86:6077-6081, which is herein incorporated by reference); and purified transcription factors (Debs et al., J. Biol. Chem. (1990) 265:10189-10192, which is herein incorporated by reference), in functional form.

[0380] Cationic liposomes are readily available. For example, N[1-2,3-dioleyloxy)propyl]-N,N,N-triethylammonium (DOTMA) liposomes are particularly useful and are available under the trademark Lipofectin, from GIBCO BRL, Grand Island, N.Y. (See, also, Felgner et al., Proc. Natl Acad. Sci. USA (1987) 84:7413-7416, which is herein incorporated by reference). Other commercially available liposomes include transfectace (DDAB/DOPE) and DOTAP/DOPE (Boehringer).

[0381] Other cationic liposomes can be prepared from readily available materials using techniques well known in the art. See, e.g. PCT Publication No. WO 90/11092 (which is herein incorporated by reference) for a description of the synthesis of DOTAP (1,2-bis(oleoyloxy)-3-(trimethylammonio)propane) liposomes. Preparation of DOTMA liposomes is explained in the literature, see, e.g., P. Felgner et al., Proc. Natl. Acad. Sci. USA 84:7413-7417, which is herein incorporated by reference. Similar methods can be used to prepare liposomes from other cationic lipid materials.

[0382] Similarly, anionic and neutral liposomes are readily available, such as from Avanti Polar Lipids (Birmingham, Ala.), or can be easily prepared using readily available materials. Such materials include phosphatidyl, choline, cholesterol, phosphatidyl ethanolamine, dioleoylphosphatidyl choline (DOPC), dioleoylphosphatidyl glycerol (DOPG), dioleoylphoshatidyl ethanolamine (DOPE), among others. These materials can also be mixed with the DOTMA and DOTAP starting materials in appropriate ratios. Methods for making liposomes using these materials are well known in the art.

[0383] For example, commercially dioleoylphosphatidyl choline (DOPC), dioleoylphosphatidyl glycerol (DOPG), and dioleoylphosphatidyl ethanolamine (DOPE) can be used in various combinations to make conventional liposomes, with or without the addition of cholesterol. Thus, for example, DOPG/DOPC vesicles can be prepared by drying 50 mg each of DOPG and DOPC under a stream of nitrogen gas into a sonication vial. The sample is placed under a vacuum pump overnight and is hydrated the following day with deionized water. The sample is then sonicated for 2 hours in a capped vial, using a Heat Systems model 350 sonicator equipped with an inverted cup (bath type) probe at the maximum setting while the bath is circulated at 15EC. Alternatively, negatively charged vesicles can be prepared without sonication to produce multilamellar vesicles or by extrusion through nucleopore membranes to produce unilamellar vesicles of discrete size. Other methods are known and available to those of skill in the art.

[0384] The liposomes can comprise multilamellar vesicles (MLVs), small unilamellar vesicles (SUVs), or large unilamellar vesicles (LUVs), with SUVs being preferred. The various liposome-nucleic acid complexes are prepared using methods well known in the art. See, e.g., Straubinger et al., Methods of Immunology (1983), 101:512-527, which is herein incorporated by reference. For example, MLVs containing nucleic acid can be prepared by depositing a thin film of phospholipid on the walls of a glass tube and subsequently hydrating with a solution of the material to be encapsulated. SUVs are prepared by extended sonication of MLVs to produce a homogeneous population of unilamellar liposomes. The material to be entrapped is added to a suspension of preformed MLVs and then sonicated. When using liposomes containing cationic lipids, the dried lipid film is resuspended in an appropriate solution such as sterile water or an isotonic buffer solution such as 10 mM Tris/NaCl, sonicated, and then the preformed liposomes are mixed directly with the DNA. The liposome and DNA form a very stable complex due to binding of the positively charged liposomes to the cationic DNA. SUVs find use with small nucleic acid fragments. LUVs are prepared by a number of methods, well known in the art. Commonly used methods include Ca²⁺-EDTA chelation (Papahadjopoulos et al., Biochim. Biophys. Acta (1975) 394:483; Wilson et al., Cell (1979) 17:77); ether injection (Deamer, D. and Bangham, A., Biochim. Biophys. Acta (1976) 443:629; Ostro et al., Biochem. Biophys. Res. Commun. (1977) 76:836; Fraley et al., Proc. Natl. Acad. Sci. USA (1979) 76:3348); detergent dialysis (Enoch, H. and Strittmatter, P., Proc. Natl. Acad. Sci. USA (1979) 76:145); and reverse-phase evaporation (REV) (Fraley et al., J. Biol. Chem. (1980) 255:10431; Szoka, F. and Papahadjopoulos, D., Proc. Natl. Acad. Sci. USA (1978) 75:145; Schaefer-Ridder et al., Science (1982) 215:166), which are herein incorporated by reference.

[0385] Generally, the ratio of DNA to liposomes will be from about 10:1 to about 1:10. Preferably, the ration will be from about 5:1 to about 1:5. More preferably, the ration will be about 3:1 to about 1:3. Still more preferably, the ratio will be about 1:1 .

[0386] U.S. Pat. No. 5,676,954 (which is herein incorporated by reference) reports on the injection of genetic material, complexed with cationic liposomes carriers, into mice. U.S. Pat. Nos. 4,897,355, 4,946,787, 5,049,386, 5,459,127, 5,589,466, 5,693,622, 5,580,859, 5,703,055, and international publication no. WO 94/9469 (which are herein incorporated by reference) provide cationic lipids for use in transfecting DNA into cells and mammals. U.S. Pat. Nos. 5,589,466, 5,693,622, 5,580,859, 5,703,055, and international publication no. WO 94/9469 (which are herein incorporated by reference) provide methods for delivering DNA-cationic lipid complexes to mammals.

[0387] In certain embodiments, cells are engineered, ex vivo or in vivo, using a retroviral particle containing RNA which comprises a sequence encoding a polypeptide of the present invention. Retroviruses from which the retroviral plasmid vectors may be derived include, but are not limited to, Moloney Murine Leukemia Virus, spleen necrosis virus, Rous sarcoma Virus, Harvey Sarcoma Virus, avian leukosis virus, gibbon ape leukemia virus, human immunodeficiency virus, Myeloproliferative Sarcoma Virus, and mammary tumor virus.

[0388] The retroviral plasmid vector is employed to transduce packaging cell lines to form producer cell lines. Examples of packaging cells which may be transfected include, but are not limited to, the PE501, PA317, R-2, R-AM, PA12, T19-14X, VT-19-17-H2, RCRE, RCRIP, GP+E-86, GP+envAml2, and DAN cell lines as described in Miller, Human Gene Therapy 1:5-14 (1990), which is incorporated herein by reference in its entirety. The vector may transduce the packaging cells through any means known in the art. Such means include, but are not limited to, electroporation, the use of liposomes, and CaPO₄ precipitation. In one alternative, the retroviral plasmid vector may be encapsulated into a liposome, or coupled to a lipid, and then administered to a host.

[0389] The producer cell line generates infectious retroviral vector particles which include polynucleotide encoding a polypeptide of the present invention. Such retroviral vector particles then may be employed, to transduce eukaryotic cells, either in vitro or in vivo. The transduced eukaryotic cells will express a polypeptide of the present invention.

[0390] In certain other embodiments, cells are engineered, ex vivo or in vivo, with polynucleotide contained in an adenovirus vector. Adenovirus can be manipulated such that it encodes and expresses a polypeptide of the present invention, and at the same time is inactivated in terms of its ability to replicate in a normal lytic viral life cycle. Adenovirus expression is achieved without integration of the viral DNA into the host cell chromosome, thereby alleviating concerns about insertional mutagenesis. Furthermore, adenoviruses have been used as live enteric vaccines for many years with an excellent safety profile (Schwartz, A. R. et al. (1974) Am. Rev. Respir. Dis.109:233-238). Finally, adenovirus mediated gene transfer has been demonstrated in a number of instances including transfer of alpha-1-antitrypsin and CFTR to the lungs of cotton rats (Rosenfeld, M. A. et al. (1991) Science 252:431-434; Rosenfeld et al., (1992) Cell 68:143-155). Furthermore, extensive studies to attempt to establish adenovirus as a causative agent in human cancer were uniformly negative (Green, M. et al. (1979) Proc. Natl. Acad. Sci. USA 76:6606).

[0391] Suitable adenoviral vectors useful in the present invention are described, for example, in Kozarsky and Wilson, Curr. Opin. Genet. Devel. 3:499-503 (1993); Rosenfeld et al., Cell 68:143-155 (1992); Engelhardt et al., Human Genet. Ther. 4:759-769 (1993); Yang et al., Nature Genet. 7:362-369 (1994); Wilson et al., Nature 365:691-692 (1993); and U.S. Pat. No. 5,652,224, which are herein incorporated by reference. For example, the adenovirus vector Ad2 is useful and can be grown in human 293 cells. These cells contain the E1 region of adenovirus and constitutively express E1a and E1b, which complement the defective adenoviruses by providing the products of the genes deleted from the vector. In addition to Ad2, other varieties of adenovirus (e.g., Ad3, Ad5, and Ad7) are also useful in the present invention.

[0392] Preferably, the adenoviruses used in the present invention are replication deficient. Replication deficient adenoviruses require the aid of a helper virus and/or packaging cell line to form infectious particles. The resulting virus is capable of infecting cells and can express a polynucleotide of interest which is operably linked to a promoter, but cannot replicate in most cells. Replication deficient adenoviruses may be deleted in one or more of all or a portion of the following genes: E1a, E1b, E3, E4, E2a, or L1 through L5.

[0393] In certain other embodiments, the cells are engineered, ex vivo or in vivo, using an adeno-associated virus (AAV). AAVs are naturally occurring defective viruses that require helper viruses to produce infectious particles (Muzyczka, N., Curr. Topics in Microbiol. immunol. 158:97 (1992)). It is also one of the few viruses that may integrate its DNA into non-dividing cells. Vectors containing as little as 300 base pairs of AAV can be packaged and can integrate, but space for exogenous DNA is limited to about 4.5 kb. Methods for producing and using such AAVs are known in the art. See, for example, U.S. Pat. Nos. 5,139,941, 5,173,414, 5,354,678, 5,436,146, 5,474,935, 5,478,745, and 5,589,377.

[0394] For example, an appropriate AAV vector for use in the present invention will include all the sequences necessary for DNA replication, encapsidation, and host-cell integration. The polynucleotide construct is inserted into the AAV vector using standard cloning methods, such as those found in Sambrook et al., Molecular Cloning: A Laboratory Manual, Cold Spring Harbor Press (1989). The recombinant AAV vector is then transfected into packaging cells which are infected with a helper virus, using any standard technique, including lipofection, electroporation, calcium phosphate precipitation, etc. Appropriate helper viruses include adenoviruses, cytomegaloviruses, vaccinia viruses, or herpes viruses. Once the packaging cells are transfected and infected, they will produce infectious AAV viral particles which contain the polynucleotide construct. These viral particles are then used to transduce eukaryotic cells, either ex vivo or in vivo. The transduced cells will contain the polynucleotide construct integrated into its genome, and will express a polypeptide of the invention.

[0395] Another method of gene therapy involves operably associating heterologous control regions and endogenous polynucleotide sequences (e.g. encoding a polypeptide of the present invention) via homologous recombination (see, e.g., U.S. Pat. No. 5,641,670, issued Jun. 24, 1997; International Publication No. WO 96/29411, published Sep. 26, 1996; International Publication No. WO 94/12650, published Aug. 4, 1994; Koller et al., Proc. Natl. Acad. Sci. USA 86:8932-8935 (1989); and Zijlstra et al., Nature 342:435-438 (1989). This method involves the activation of a gene which is present in the target cells, but which is not normally expressed in the cells, or is expressed at a lower level than desired.

[0396] Polynucleotide constructs are made, using standard techniques known in the art, which contain the promoter with targeting sequences flanking the promoter. Suitable promoters are described herein. The targeting sequence is sufficiently complementary to an endogenous sequence to permit homologous recombination of the promoter-targeting sequence with the endogenous sequence. The targeting sequence will be sufficiently near the 5′ end of the desired endogenous polynucleotide sequence so the promoter will be operably linked to the endogenous sequence upon homologous recombination.

[0397] The promoter and the targeting sequences can be amplified using PCR. Preferably, the amplified promoter contains distinct restriction enzyme sites on the 5′ and 3′ ends. Preferably, the 3′ end of the first targeting sequence contains the same restriction enzyme site as the 5′ end of the amplified promoter and the 5′ end of the second targeting sequence contains the same restriction site as the 3′ end of the amplified promoter. The amplified promoter and targeting sequences are digested and ligated together.

[0398] The promoter-targeting sequence construct is delivered to the cells, either as naked polynucleotide, or in conjunction with transfection-facilitating agents, such as liposomes, viral sequences, viral particles, whole viruses, lipofection, precipitating agents, etc., described in more detail above. The P promoter-targeting sequence can be delivered by any method, included direct needle injection, intravenous injection, topical administration, catheter infusion, particle accelerators, etc. The methods are described in more detail below.

[0399] The promoter-targeting sequence construct is taken up by cells. Homologous recombination between the construct and the endogenous sequence takes place, such that an endogenous sequence is placed under the control of the promoter. The promoter then drives the expression of the endogenous sequence.

[0400] Preferably, the polynucleotide encoding a polypeptide of the present invention contains a secretory signal sequence that facilitates secretion of the protein. Typically, the signal sequence is positioned in the coding region of the polynucleotide to be expressed towards or at the 5′ end of the coding region. The signal sequence may be homologous or heterologous to the polynucleotide of interest and may be homologous or heterologous to the cells to be transfected. Additionally, the signal sequence may be chemically synthesized using methods known in the art.

[0401] Any mode of administration of any of the above-described polynucleotides constructs can be used so long as the mode results in the expression of one or more molecules in an amount sufficient to provide a therapeutic effect. This includes direct needle injection, systemic injection, catheter infusion, biolistic injectors, particle accelerators (i.e., “gene guns”), gelfoam sponge depots, other commercially available depot materials, osmotic pumps (e.g., Alza minipumps), oral or suppositorial solid (tablet or pill) pharmaceutical formulations, and decanting or topical applications during surgery. For example, direct injection of naked calcium phosphate-precipitated plasmid into rat liver and rat spleen or a protein-coated plasmid into the portal vein has resulted in gene expression of the foreign gene in the rat livers (Kaneda et al., Science 243:375 (1989)).

[0402] A preferred method of local administration is by direct injection. Preferably, a recombinant molecule of the present invention complexed with a delivery vehicle is administered by direct injection into or locally within the area of arteries. Administration of a composition locally within the area of arteries refers to injecting the composition centimeters and preferably, millimeters within arteries.

[0403] Another method of local administration is to contact a polynucleotide construct of the present invention in or around a surgical wound. For example, a patient can undergo surgery and the polynucleotide construct can be coated on the surface of tissue inside the wound or the construct can be injected into areas of tissue inside the wound.

[0404] Therapeutic compositions useful in systemic administration, include recombinant molecules of the present invention complexed to a targeted delivery vehicle of the present invention. Suitable delivery vehicles for use with systemic administration comprise liposomes comprising ligands for targeting the vehicle to a particular site.

[0405] Preferred methods of systemic administration, include intravenous injection, aerosol, oral and percutaneous (topical) delivery. Intravenous injections can be performed using methods standard in the art. Aerosol delivery can also be performed using methods standard in the art (see, for example, Stribling et al., Proc. Natl. Acad. Sci. USA 189:11277-11281, 1992, which is incorporated herein by reference). Oral delivery can be performed by complexing a polynucleotide construct of the present invention to a carrier capable of withstanding degradation by digestive enzymes in the gut of an animal. Examples of such carriers, include plastic capsules or tablets, such as those known in the art. Topical delivery can be performed by mixing a polynucleotide construct of the present invention with a lipophilic reagent (e.g., DMSO) that is capable of passing into the skin.

[0406] Determining an effective amount of substance to be delivered can depend upon a number of factors including, for example, the chemical structure and biological activity of the substance, the age and weight of the animal, the precise condition requiring treatment and its severity, and the route of administration. The frequency of treatments depends upon a number of factors, such as the amount of polynucleotide constructs administered per dose, as well as the health and history of the subject. The precise amount, number of doses, and timing of doses will be determined by the attending physician or veterinarian.

[0407] Therapeutic compositions of the present invention can be administered to any animal, preferably to mammals and birds. Preferred mammals include humans, dogs, cats, mice, rats, rabbits sheep, cattle, horses and pigs, with humans being particularly preferred.

[0408] Biological Activities

[0409] Polynucleotides or polypeptides, or agonists or antagonists of the present invention, can be used in assays to test for one or more biological activities. If these polynucleotides or polypeptides, or agonists or antagonists of the present invention, do exhibit activity in a particular assay, it is likely that these molecules may be involved in the diseases associated with the biological activity. Thus, the polynucleotides and polypeptides, and agonists or antagonists could be used to treat, prevent diagnose and/or prognose the associated disease.

[0410] The cancer antigen polynucleotides and polypeptides of the invention are predicted to have predominant expression in cancer tissues as described in column 10 of the corresponding row of Table 1.

[0411] Thus, the cancer antigens of the invention may be useful as therapeutic molecules. Each would be useful for diagnosis, detection, treatment and/or prevention of diseases and/or disorders, including but not limited to cancers of these tissues.

[0412] In a preferred embodiment, polynucleotides of the invention (e.g., a nucleic acid sequence of SEQ ID NO:X or the complement thereof; or the nucleotide coding sequence of the related cDNA sequence contained in a deposited library, a nucleotide sequence encoding SEQ ID NO:Y, a nucleotide sequence encoding the polypeptide encoded by the cDNA in the related cDNA clone contained in a deposited library, or fragments or variants thereof) and/or polypeptides of the invention (e.g., an amino acid sequence contained in SEQ ID NO:Y, an amino acid sequence encoded by SEQ ID NO:X, an amino acid sequence encoded by the cDNA in the related cDNA clone contained in a deposited library, and fragments or variants thereof as described herein) are useful for the diagnosis, detection, treatement, and/or prevention of diseases or disorders of the tissues/cells corresponding to the tissue disclosed in column 10 of Table 1 expressing the corresponding cancer sequence disclosed in the same row of Table 1. In certain embodiments, a polypeptide of the invention, or polynucleotides, antibodies, agonists, or antagonists corresponding to that polypeptide, may be used to diagnose and/or prognose diseases and/or disorders associated with the tissue(s) in which the polypeptide of the invention is expressed, including one, two, three, four, five, or more tissues disclosed in Table 1, column 10 (Tissue(s)).

[0413] Particularly, the cancer antigens may be a useful therapeutic for cancer. Treatment, diagnosis, detection, and/or prevention of cancer-related disorders could be carried out using a cancer antigen or soluble form of a cancer antigen, a cancer antigen ligand, gene therapy, or ex vivo applications. Moreover, inhibitors of a cancer antigen, either blocking antibodies or mutant forms, could modulate the expression of the cancer antigen. These inhibitors may be useful to treat, diagnose, detect, and/or prevent diseases associated with the misregulation of a cancer antigen.

[0414] In one embodiment, the invention provides a method for the specific delivery of compositions of the invention to cells (e.g., normal or diseased cells) by administering polypeptides of the invention (e.g., cancer antigen polypeptides or anti-cancer antigen antibodies) that are associated with heterologous polypeptides or nucleic acids. In one example, the invention provides a method for delivering a therapeutic protein into the targeted cell (e.g., an aberrant cell, or cancerous cell). In another example, the invention provides a method for delivering a single stranded nucleic acid (e.g., antisense or ribozymes) or double stranded nucleic acid (e.g., DNA that can integrate into the cell's genome or replicate episomally and that can be transcribed) into the targeted cell.

[0415] In another embodiment, the invention provides a method for the specific destruction of cells (e.g., the destruction of aberrant cells, including, but not limited to, tumor cells) by administering polypeptides of the invention (e.g., cancer antigen polypeptides or fragments thereof, or anti-cancer antigen antibodies) in association with toxins or cytotoxic prodrugs.

[0416] By “toxin” is meant compounds that bind and activate endogenous cytotoxic effector systems, radioisotopes, holotoxins, modified toxins, catalytic subunits of toxins, cytotoxins (cytotoxic agents), or any molecules or enzymes not normally present in or on the surface of a cell that under defined conditions cause the cell's death. Toxins that may be used according to the methods of the invention include, but are not limited to, radioisotopes known in the art, compounds such as, for example, antibodies (or complement fixing containing portions thereof) that bind an inherent or induced endogenous cytotoxic effector system, thymidine kinase, endonuclease, RNAse, alpha toxin, ricin, abrin, Pseudomonas exotoxin A, diphtheria toxin, saporin, momordin, gelonin, pokeweed antiviral protein, alpha-sarcin and cholera toxin. “Toxin” also includes a cytostatic or cytocidal agent, a therapeutic agent or a radioactive metal ion, e.g., alpha-emitters such as, for example, ²¹³Bi, or other radioisotopes such as, for example, ¹⁰³Pd, ¹³³Xe, ¹³¹I, ⁶⁸Ge, ⁵⁷Co, ⁶⁵Zn, ⁸⁵Sr, ³²P, ³⁵S, ⁹⁰Y, ¹⁵³Sm, ¹⁵³Gd, ¹⁶⁹Yb, ⁵¹Cr, ⁵⁴Mn, ⁷⁵Se, ¹¹³Sn, ⁹⁰Yttrium, ¹¹⁷Tin, ¹⁸⁶Rhenium, ¹⁶⁶Holmium, and ¹⁸⁸Rhenium; luminescent labels, such as luminol; and fluorescent labels, such as fluorescein and rhodamine, and biotin.

[0417] Techniques known in the art may be applied to label antibodies of the invention. Such techniques include, but are not limited to, the use of bifunctional conjugating agents (see e.g., U.S. Pat. Nos. 5,756,065; 5,714,631; 5,696,239; 5,652,361; 5,505,931; 5,489,425; 5,435,990; 5,428,139; 5,342,604; 5,274,119; 4,994,560; and 5,808,003; the contents of each of which are hereby incorporated by reference in its entirety). A cytotoxin or cytotoxic agent includes any agent that is detrimental to cells. Examples include paclitaxol, cytochalasin B, gramicidin D, ethidium bromide, emetine, mitomycin, etoposide, tenoposide, vincristine, vinblastine, colchicin, doxorubicin, daunorubicin, dihydroxy anthracin dione, mitoxantrone, mithramycin, actinomycin D, 1-dehydrotestosterone, glucocorticoids, procaine, tetracaine, lidocaine, propranolol, and puromycin and analogs or homologs thereof. Therapeutic agents include, but are not limited to, antimetabolites (e.g., methotrexate, 6-mercaptopurine, 6-thioguanine, cytarabine, 5-fluorouracil decarbazine), alkylating agents (e.g., mechlorethamine, thioepa chlorambucil, melphalan, carmustine (BSNU) and lomustine (CCNU), cyclothosphamide, busulfan, dibromomannitol, streptozotocin, mitomycin C, and cis- dichlorodiamine platinum (II) (DDP) cisplatin), anthracyclines (e.g., daunorubicin (formerly daunomycin) and doxorubicin), antibiotics (e.g., dactinomycin (formerly actinomycin), bleomycin, mithramycin, and anthramycin (AMC)), and anti-mitotic agents (e.g., vincristine and vinblastine).

[0418] By “cytotoxic prodrug” is meant a non-toxic compound that is converted by an enzyme, normally present in the cell, into a cytotoxic compound. Cytotoxic prodrugs that may be used according to the methods of the invention include, but are not limited to, glutamyl derivatives of benzoic acid mustard alkylating agent, phosphate derivatives of etoposide or mitomycin C, cytosine arabinoside, daunorubisin, and phenoxyacetamide derivatives of doxorubicin.

[0419] It will be appreciated that conditions caused by a decrease in the standard or normal level of a cancer antigen activity in an individual, particularly disorders of the the tissue shown in column 10 of the corresponding row of Table 1, can be treated by administration of a cancer antigen polypeptide (e.g., such as, for example, the complete cancer antigen polypeptide, the soluble form of the extracellular domain of a cancer antigen polypeptide, or cells expressing the complete protein) or agonist. Thus, the invention also provides a method of treatment of an individual in need of an increased level of cancer antigen activity comprising administering to such an individual a pharmaceutical composition comprising an amount of an isolated cancer antigen polypeptide of the invention, or agonist thereof (e.g., an agonistic anti-cancer antigen antibody), effective to increase the cancer antigen activity level in such an individual.

[0420] It will also be appreciated that conditions caused by a increase in the standard or normal level of cancer antigen activity in an individual, particularly disorders of the the tissue shown in column 10 of the corresponding row of Table 1, can be treated by administration of cancer antigen polypeptides (e.g., such as, for example, the complete cancer antigen polypeptide, the soluble form of the extracellular domain of a cancer antigen polypeptide, or cells expressing the complete protein) or antagonist (e.g., an antagonistic cancer antigen antibody). Thus, the invention also provides a method of treatment of an individual in need of an decreased level of cancer antigen activity comprising administering to such an individual a pharmaceutical composition comprising an amount of an isolated cancer antigen polypeptide of the invention, or antagonist thereof (e.g., an antagonistic anti-cancer antigen antibody), effective to decrease the cancer antigen activity level in such an individual.

[0421] In certain embodiments, a polypeptide of the invention, or polynucleotides, antibodies, agonists, or antagonists corresponding to that polypeptide, may be used to diagnose and/or prognose diseases and/or disorders associated with the tissue(s) in which the polypeptide of the invention is expressed, including one, two, three, four, five, or more tissues disclosed in Table 1, column 10 (Tissue(s)).

[0422] More generally, polynucleotides, translation products and antibodies corresponding to this gene may be useful for the diagnosis, prognosis, prevention, and/or treatment of diseases and/or disorders associated with the following systems.

[0423] Hyperproliferative Disorders

[0424] Cancer associated polynucleotides or polypeptides, or agonists or antagonists thereof, can be used to treat, prevent, diagnose and/or prognose hyperproliferative diseases, disorders, and/or conditions, including neoplasms.

[0425] In a specific embodiment, cancer associated polynucleotides or polypeptides, or agonists or antagonists thereof, can be used to treat, prevent, and/or diagnose hyperproliferative diseases, disorders, and/or conditions of the related tissues as disclosed in column 10 of Table 1.

[0426] In a preferred embodiment, cancer associated polynucleotides or polypeptides, or agonists or antagonists thereof, can be used to treat, prevent, and/or diagnose neoplasms.

[0427] Cancer associated polynucleotides or polypeptides, or agonists or antagonists of the invention, may inhibit the proliferation of the disorder through direct or indirect interactions. Alternatively, cancer associated polynucleotides or polypeptides, or agonists or antagonists thereof, may proliferate other cells, which can inhibit the hyperproliferative disorder.

[0428] For example, by increasing an immune response, particularly increasing antigenic qualities of the hyperproliferative disorder or by proliferating, differentiating, or mobilizing T-cells, hyperproliferative diseases, disorders, and/or conditions can be treated, prevented, and/or diagnosed. This immune response may be increased by either enhancing an existing immune response, or by initiating a new immune response. Alternatively, decreasing an immune response may also be a method of treating, preventing, and/or diagnosing hyperproliferative diseases, disorders, and/or conditions, such as a chemotherapeutic agent.

[0429] Examples of hyperproliferative diseases, disorders, and/or conditions that can be treated, prevented, and/or diagnosed by cancer associated polynucleotides or polypeptides, or agonists or antagonists thereof, include, but are not limited to neoplasms located in the: prostate, colon, abdomen, bone, breast, digestive system, liver, pancreas, peritoneum, endocrine glands (adrenal, parathyroid, pituitary, testicles, ovary, thymus, thyroid), eye, head and neck, nervous (central and peripheral), lymphatic system, pelvic, skin, soft tissue, spleen, thoracic, and urogenital.

[0430] Similarly, other hyperproliferative disorders can also be treated or detected by polynucleotides or polypeptides, or agonists or antagonists of the present invention. Examples of such hyperproliferative disorders include, but are not limited to: Acute Childhood Lymphoblastic Leukemia, Acute Lymphoblastic Leukemia, Acute Lymphocytic Leukemia, Acute Myeloid Leukemia, Adrenocortical Carcinoma, Adult (Primary) Hepatocellular Cancer, Adult (Primary) Liver Cancer, Adult Acute Lymphocytic Leukemia, Adult Acute Myeloid Leukemia, Adult Hodgkin's Disease, Adult Hodgkin's Lymphoma, Adult Lymphocytic Leukemia, Adult Non-Hodgkin's Lymphoma, Adult Primary Liver Cancer, Adult Soft Tissue Sarcoma, AIDS-Related Lymphoma, AIDS-Related Malignancies, Anal Cancer, Astrocytoma, Bile Duct Cancer, Bladder Cancer, Bone Cancer, Brain Stem Glioma, Brain Tumors, Breast Cancer, Cancer of the Renal Pelvis and Ureter, Central Nervous System (Primary) Lymphoma, Central Nervous System Lymphoma, Cerebellar Astrocytoma, Cerebral Astrocytoma, Cervical Cancer, Childhood (Primary) Hepatocellular Cancer, Childhood (Primary) Liver Cancer, Childhood Acute Lymphoblastic Leukemia, Childhood Acute Myeloid Leukemia, Childhood Brain Stem Glioma, Childhood Cerebellar Astrocytoma, Childhood Cerebral Astrocytoma, Childhood Extracranial Germ Cell Tumors, Childhood Hodgkin's Disease, Childhood Hodgkin's Lymphoma, Childhood Hypothalamic and Visual Pathway Glioma, Childhood Lymphoblastic Leukemia, Childhood Medulloblastoma, Childhood Non-Hodgkin's Lymphoma, Childhood Pineal and Supratentorial Primitive Neuroectodermal Tumors, Childhood Primary Liver Cancer, Childhood Rhabdomyosarcoma, Childhood Soft Tissue Sarcoma, Childhood Visual Pathway and Hypothalamic Glioma, Chronic Lymphocytic Leukemia, Chronic Myelogenous Leukemia, Colon Cancer, Cutaneous T-Cell Lymphoma, Endocrine Pancreas Islet Cell Carcinoma, Endometrial Cancer, Ependymoma, Epithelial Cancer, Esophageal Cancer, Ewing's Sarcoma and Related Tumors, Exocrine Pancreatic Cancer, Extracranial Germ Cell Tumor, Extragonadal Germ Cell Tumor, Extrahepatic Bile Duct Cancer, Eye Cancer, Female Breast Cancer, Gaucher's Disease, Gallbladder Cancer, Gastric Cancer, Gastrointestinal Carcinoid Tumor, Gastrointestinal Tumors, Germ Cell Tumors, Gestational Trophoblastic Tumor, Hairy Cell Leukemia, Head and Neck Cancer, Hepatocellular Cancer, Hodgkin's Disease, Hodgkin's Lymphoma, Hypergammaglobulinemia, Hypopharyngeal Cancer, Intestinal Cancers, Intraocular Melanoma, Islet Cell Carcinoma, Islet Cell Pancreatic Cancer, Kaposi's Sarcoma, Kidney Cancer, Laryngeal Cancer, Lip and Oral Cavity Cancer, Liver Cancer, Lung Cancer, Lymphoproliferative Disorders, Macroglobulinemia, Male Breast Cancer, Malignant Mesothelioma, Malignant Thymoma, Medulloblastoma, Melanoma, Mesothelioma, Metastatic Occult Primary Squamous Neck Cancer, Metastatic Primary Squamous Neck Cancer, Metastatic Squamous Neck Cancer, Multiple Myeloma, Multiple Myeloma/Plasma Cell Neoplasm, Myelodysplastic Syndrome, Myelogenous Leukemia, Myeloid Leukemia, Myeloproliferative Disorders, Nasal Cavity and Paranasal Sinus Cancer, Nasopharyngeal Cancer, Neuroblastoma, Non-Hodgkin's Lymphoma During Pregnancy, Nonmelanoma Skin Cancer, Non-Small Cell Lung Cancer, Occult Primary Metastatic Squamous Neck Cancer, Oropharyngeal Cancer, Osteo-/Malignant Fibrous Sarcoma, Osteosarcoma/Malignant Fibrous Histiocytoma, Osteosarcoma/Malignant Fibrous Histiocytoma of Bone, Ovarian Epithelial Cancer, Ovarian Germ Cell Tumor, Ovarian Low Malignant Potential Tumor, Pancreatic Cancer, Paraproteinemias, Purpura, Parathyroid Cancer, Penile Cancer, Pheochromocytoma, Pituitary Tumor, Plasma Cell Neoplasm/Multiple Myeloma, Primary Central Nervous System Lymphoma, Primary Liver Cancer, Prostate Cancer, Rectal Cancer, Renal Cell Cancer, Renal Pelvis and Ureter Cancer, Retinoblastoma, Rhabdomyosarcoma, Salivary Gland Cancer, Sarcoidosis Sarcomas, Sezary Syndrome, Skin Cancer, Small Cell Lung Cancer, Small Intestine Cancer, Soft Tissue Sarcoma, Squamous Neck Cancer, Stomach Cancer, Supratentorial Primitive Neuroectodermal and Pineal Tumors, T-Cell Lymphoma, Testicular Cancer, Thymoma, Thyroid Cancer, Transitional Cell Cancer of the Renal Pelvis and Ureter, Transitional Renal Pelvis and Ureter Cancer, Trophoblastic Tumors, Ureter and Renal Pelvis Cell Cancer, Urethral Cancer, Uterine Cancer, Uterine Sarcoma, Vaginal Cancer, Visual Pathway and Hypothalamic Glioma, Vulvar Cancer, Waldenstrom's Macroglobulinemia, Wilms' Tumor, and any other hyperproliferative disease, besides neoplasia, located in an organ system listed above.

[0431] In another preferred embodiment, polynucleotides or polypeptides, or agonists or antagonists of the present invention are used to diagnose, prognose, prevent, and/or treat premalignant conditions and to prevent progression to a neoplastic or malignant state, including but not limited to those disorders described above. Such uses are indicated in conditions known or suspected of preceding progression to neoplasia or cancer, in particular, where non-neoplastic cell growth consisting of hyperplasia, metaplasia, or most particularly, dysplasia has occurred (for review of such abnormal growth conditions, see Robbins and Angell, 1976, Basic Pathology, 2d Ed., W. B. Saunders Co., Philadelphia, pp. 68-79.)

[0432] Hyperplasia is a form of controlled cell proliferation, involving an increase in cell number in a tissue or organ, without significant alteration in structure or function. Hyperplastic disorders which can be diagnosed, prognosed, prevented, and/or treated with compositions of the invention (including polynucleotides, polypeptides, agonists or antagonists) include, but are not limited to, angiofollicular mediastinal lymph node hyperplasia, angiolymphoid hyperplasia with eosinophilia, atypical melanocytic hyperplasia, basal cell hyperplasia, benign giant lymph node hyperplasia, cementum hyperplasia, congenital adrenal hyperplasia, congenital sebaceous hyperplasia, cystic hyperplasia, cystic hyperplasia of the breast, denture hyperplasia, ductal hyperplasia, endometrial hyperplasia, fibromuscular hyperplasia, focal epithelial hyperplasia, gingival hyperplasia, inflammatory fibrous hyperplasia, inflammatory papillary hyperplasia, intravascular papillary endothelial hyperplasia, nodular hyperplasia of prostate, nodular regenerative hyperplasia, pseudoepitheliomatous hyperplasia, senile sebaceous hyperplasia, and verrucous hyperplasia.

[0433] Metaplasia is a form of controlled cell growth in which one type of adult or fully differentiated cell substitutes for another type of adult cell. Metaplastic disorders which can be diagnosed, prognosed, prevented, and/or treated with compositions of the invention (including polynucleotides, polypeptides, agonists or antagonists) include, but are not limited to, agnogenic myeloid metaplasia, apocrine metaplasia, atypical metaplasia, autoparenchymatous metaplasia, connective tissue metaplasia, epithelial metaplasia, intestinal metaplasia, metaplastic anemia, metaplastic ossification, metaplastic polyps, myeloid metaplasia, primary myeloid metaplasia, secondary myeloid metaplasia, squamous metaplasia, squamous metaplasia of amnion, and symptomatic myeloid metaplasia.

[0434] Dysplasia is frequently a forerunner of cancer, and is found mainly in the epithelia; it is the most disorderly form of non-neoplastic cell growth, involving a loss in individual cell uniformity and in the architectural orientation of cells. Dysplastic cells often have abnormally large, deeply stained nuclei, and exhibit pleomorphism. Dysplasia characteristically occurs where there exists chronic irritation or inflammation. Dysplastic disorders which can be diagnosed, prognosed, prevented, and/or treated with compositions of the invention (including polynucleotides, polypeptides, agonists or antagonists) include, but are not limited to, anhidrotic ectodermal dysplasia, anterofacial dysplasia, asphyxiating thoracic dysplasia, atriodigital dysplasia, bronchopulmonary dysplasia, cerebral dysplasia, cervical dysplasia, chondroectodermal dysplasia, cleidocranial dysplasia, congenital ectodermal dysplasia, craniodiaphysial dysplasia, craniocarpotarsal dysplasia, craniometaphysial dysplasia, dentin dysplasia, diaphysial dysplasia, ectodermal dysplasia, enamel dysplasia, encephalo-ophthalmic dysplasia, dysplasia epiphysialis hemimelia, dysplasia epiphysialis multiplex, dysplasia epiphysialis punctata, epithelial dysplasia, faciodigitogenital dysplasia, familial fibrous dysplasia of jaws, familial white folded dysplasia, fibromuscular dysplasia, fibrous dysplasia of bone, florid osseous dysplasia, hereditary renal-retinal dysplasia, hidrotic ectodermal dysplasia, hypohidrotic ectodermal dysplasia, lymphopenic thymic dysplasia, mammary dysplasia, mandibulofacial dysplasia, metaphysial dysplasia, Mondini dysplasia, monostotic fibrous dysplasia, mucoepithelial dysplasia, multiple epiphysial dysplasia, oculoauriculovertebral dysplasia, oculodentodigital dysplasia, oculovertebral dysplasia, odontogenic dysplasia, ophthalmomandibulomelic dysplasia, periapical cemental dysplasia, polyostotic fibrous dysplasia, pseudoachondroplastic spondyloepiphysial dysplasia, retinal dysplasia, septo-optic dysplasia, spondyloepiphysial dysplasia, and ventriculoradial dysplasia.

[0435] Additional pre-neoplastic disorders which can be diagnosed, prognosed, prevented, and/or treated with compositions of the invention (including polynucleotides, polypeptides, agonists or antagonists) include, but are not limited to, benign dysproliferative disorders (e.g., benign tumors, fibrocystic conditions, tissue hypertrophy, intestinal polyps, colon polyps, and esophageal dysplasia), leukoplakia, keratoses, Bowen's disease, Farmer's Skin, solar cheilitis, and solar keratosis.

[0436] In another embodiment, a polypeptide of the invention, or polynucleotides, antibodies, agonists, or antagonists corresponding to that polypeptide, may be used to diagnose and/or prognose disorders associated with the tissue(s) in which the polypeptide of the invention is expressed, including one, two, three, four, five, or more tissues disclosed in Table 1, column 10 (Tissue(s)).

[0437] In another embodiment, polynucleotides, polypeptides, antibodies, and/or agonists or antagonists of the present invention conjugated to a toxin or a radioactive isotope, as described herein, may be used to treat cancers and neoplasms, including, but not limited to those described herein. In a further preferred embodiment, polynucleotides, polypeptides, antibodies, and/or agonists or antagonists of the present invention conjugated to a toxin or a radioactive isotope, as described herein, may be used to treat acute myelogenous leukemia.

[0438] Additionally, polynucleotides, polypeptides, and/or agonists or antagonists of the invention may affect apoptosis, and therefore, would be useful in treating a number of diseases associated with increased cell survival or the inhibition of apoptosis. For example, diseases associated with increased cell survival or the inhibition of apoptosis that could be diagnosed, prognosed, prevented, and/or treated by polynucleotides, polypeptides, and/or agonists or antagonists of the invention, include cancers (such as follicular lymphomas, carcinomas with p53 mutations, and hormone-dependent tumors, including, but not limited to colon cancer, cardiac tumors, pancreatic cancer, melanoma, retinoblastoma, glioblastoma, lung cancer, intestinal cancer, testicular cancer, stomach cancer, neuroblastoma, myxoma, myoma, lymphoma, endothelioma, osteoblastoma, osteoclastoma, osteosarcoma, chondrosarcoma, adenoma, breast cancer, prostate cancer, Kaposi's sarcoma and ovarian cancer); autoimmune disorders such as, multiple sclerosis, Sjogren's syndrome, Hashimoto's thyroiditis, biliary cirrhosis, Behcet's disease, Crohn's disease, polymyositis, systemic lupus erythematosus and immune-related glomerulonephritis and rheumatoid arthritis) and viral infections (such as herpes viruses, pox viruses and adenoviruses), inflammation, graft v. host disease, acute graft rejection, and chronic graft rejection.

[0439] In preferred embodiments, polynucleotides, polypeptides, and/or agonists or antagonists of the invention are used to inhibit growth, progression, and/or metastasis of cancers, in particular those listed above.

[0440] Additional diseases or conditions associated with increased cell survival that could be diagnosed, prognosed, prevented, and/or treated by polynucleotides, polypeptides, and/or agonists or antagonists of the invention, include, but are not limited to, progression, and/or metastases of malignancies and related disorders such as leukemia (including acute leukemias (e.g., acute lymphocytic leukemia, acute myelocytic leukemia (including myeloblastic, promyelocytic, myelomonocytic, monocytic, and erythroleukemia)) and chronic leukemias (e.g., chronic myelocytic (granulocytic) leukemia and chronic lymphocytic leukemia)), polycythemia vera, lymphomas (e.g., Hodgkin's disease and non-Hodgkin's disease), multiple myeloma, Waldenstrom's macroglobulinemia, heavy chain disease, and solid tumors including, but not limited to, sarcomas and carcinomas such as fibrosarcoma, myxosarcoma, liposarcoma, chondrosarcoma, osteogenic sarcoma, chordoma, angiosarcoma, endotheliosarcoma, lymphangiosarcoma, lymphangioendotheliosarcoma, synovioma, mesothelioma, Ewing's tumor, leiomyosarcoma, rhabdomyosarcoma, colon carcinoma, pancreatic cancer, breast cancer, ovarian cancer, prostate cancer, squamous cell carcinoma, basal cell carcinoma, adenocarcinoma, sweat gland carcinoma, sebaceous gland carcinoma, papillary carcinoma, papillary adenocarcinomas, cystadenocarcinoma, medullary carcinoma, bronchogenic carcinoma, renal cell carcinoma, hepatoma, bile duct carcinoma, choriocarcinoma, seminoma, embryonal carcinoma, Wilm's tumor, cervical cancer, testicular tumor, lung carcinoma, small cell lung carcinoma, bladder carcinoma, epithelial carcinoma, glioma, astrocytoma, medulloblastoma, craniopharyngioma, ependymoma, pinealoma, emangioblastoma, acoustic neuroma, oligodendroglioma, menangioma, melanoma, neuroblastoma, and retinoblastoma.

[0441] Diseases associated with increased apoptosis that could be diagnosed, prognosed, prevented, and/or treated by polynucleotides, polypeptides, and/or agonists or antagonists of the invention, include AIDS; neurodegenerative disorders (such as Alzheimer's disease, Parkinson's disease, amyotrophic lateral sclerosis, retinitis pigmentosa, cerebellar degeneration and brain tumor or prior associated disease); autoimmune disorders (such as, multiple sclerosis, Sjogren's syndrome, Hashimoto's thyroiditis, biliary cirrhosis, Behcet's disease, Crohn's disease, polymyositis, systemic lupus erythematosus and immune-related glomerulonephritis and rheumatoid arthritis) myelodysplastic syndromes (such as aplastic anemia), graft v. host disease, ischemic injury (such as that caused by myocardial infarction, stroke and reperfusion injury), liver injury (e.g., hepatitis related liver injury, ischemia/reperfusion injury, cholestosis (bile duct injury) and liver cancer); toxin-induced liver disease (such as that caused by alcohol), septic shock, cachexia and anorexia.

[0442] Hyperproliferative diseases and/or disorders that could be diagnosed, prognosed, prevented, and/or treated by polynucleotides, polypeptides, and/or agonists or antagonists of the invention, include, but are not limited to, neoplasms located in the liver, abdomen, bone, breast, digestive system, pancreas, peritoneum, endocrine glands (adrenal, parathyroid, pituitary, testicles, ovary, thymus, thyroid), eye, head and neck, nervous system (central and peripheral), lymphatic system, pelvis, skin, soft tissue, spleen, thorax, and urogenital tract.

[0443] Similarly, other hyperproliferative disorders can also be diagnosed, prognosed, prevented, and/or treated by polynucleotides, polypeptides, and/or agonists or antagonists of the invention. Examples of such hyperproliferative disorders include, but are not limited to: hypergammaglobulinemia, lymphoproliferative disorders, paraproteinemias, purpura, sarcoidosis, Sezary Syndrome, Waldenstron's macroglobulinemia, Gaucher's Disease, histiocytosis, and any other hyperproliferative disease, besides neoplasia, located in an organ system listed above.

[0444] One preferred embodiment utilizes polynucleotides of the present invention to inhibit aberrant cellular division, by gene therapy using the present invention, and/or protein fusions or fragments thereof.

[0445] Thus, the present invention provides a method for treating cell proliferative diseases, disorders, and/or conditions by inserting into an abnormally proliferating cell a polynucleotide of the present invention, wherein said polynucleotide represses said cell proliferation, disease, disorder, and/or condition.

[0446] In a preferred embodiment, the present invention provides a method for treating cell proliferative diseases, disorders and/or conditions of the pancreatic cancer by inserting into a cell, a polynucleotide of the present invention, wherein said polynucleotide represses said cell proliferation, disease and/or disorder.

[0447] Another embodiment of the present invention provides a method of treating cell-proliferative diseases, disorders, and/or conditions in individuals comprising administration of one or more active gene copies of the present invention to an abnormally proliferating cell or cells. In a preferred embodiment, polynucleotides of the present invention is a DNA construct comprising a recombinant expression vector effective in expressing a DNA sequence encoding said polynucleotides. In another preferred embodiment of the present invention, the DNA construct encoding the polynucleotides of the present invention is inserted into cells to be treated utilizing a retrovirus, or more preferably an adenoviral vector (see, e.g., G J. Nabel, et. al., PNAS 96: 324-326 (1999), which is hereby incorporated by reference). In a most preferred embodiment, the viral vector is defective and will not transform non-proliferating cells, only proliferating cells. Moreover, in a preferred embodiment, the polynucleotides of the present invention inserted into proliferating cells either alone, or in combination with or fused to other polynucleotides, can then be modulated via an external stimulus (i.e., magnetic, specific small molecule, chemical, or drug administration, etc.), which acts upon the promoter upstream of said polynucleotides to induce expression of the encoded protein product. As such the beneficial therapeutic affect of the present invention may be expressly modulated (i.e., to increase, decrease, or inhibit expression of the present invention) based upon said external stimulus.

[0448] Polynucleotides of the present invention may be useful in repressing expression of oncogenic genes or antigens. By “repressing expression of the oncogenic genes” is intended the suppression of the transcription of the gene, the degradation of the gene transcript (pre-message RNA), the inhibition of splicing, the destruction of the messenger RNA, the prevention of the post-translational modifications of the protein, the destruction of the protein, or the inhibition of the normal function of the protein.

[0449] For local administration to abnormally proliferating cells, polynucleotides of the present invention may be administered by any method known to those of skill in the art including, but not limited to transfection, electroporation, microinjection of cells, or in vehicles such as liposomes, lipofectin, or as naked polynucleotides, or any other method described throughout the specification. The polynucleotide of the present invention may be delivered by known gene delivery systems such as, but not limited to, retroviral vectors (Gilboa, J. Virology 44:845 (1982); Hocke, Nature 320:275 (1986); Wilson, et al., Proc. Natl. Acad. Sci. U.S.A. 85:3014), vaccinia virus system (Chakrabarty et al., Mol. Cell Biol. 5:3403 (1985) or other efficient DNA delivery systems (Yates et al., Nature 313:812 (1985)) known to those skilled in the art. These references are exemplary only and are hereby incorporated by reference. In order to specifically deliver or transfect cells which are abnormally proliferating and spare non-dividing cells, it is preferable to utilize a retrovirus, or adenoviral (as described in the art and elsewhere herein) delivery system known to those of skill in the art. Since host DNA replication is required for retroviral DNA to integrate and the retrovirus will be unable to self replicate due to the lack of the retrovirus genes needed for its life cycle. Utilizing such a retroviral delivery system for polynucleotides of the present invention will target said gene and constructs to abnormally proliferating cells and will spare the non-dividing normal cells.

[0450] The polynucleotides of the present invention may be delivered directly to cell proliferative disorder/disease sites in internal organs, body cavities and the like by use of imaging devices used to guide an injecting needle directly to the disease site. The polynucleotides of the present invention may also be administered to disease sites at the time of surgical intervention.

[0451] By “cell proliferative disease” is meant any human or animal disease or disorder, affecting any one or any combination of organs, cavities, or body parts, which is characterized by single or multiple local abnormal proliferations of cells, groups of cells, or tissues, whether benign or malignant.

[0452] Any amount of the polynucleotides of the present invention may be administered as long as it has a biologically inhibiting effect on the proliferation of the treated cells. Moreover, it is possible to administer more than one of the polynucleotide of the present invention simultaneously to the same site. By “biologically inhibiting” is meant partial or total growth inhibition as well as decreases in the rate of proliferation or growth of the cells. The biologically inhibitory dose may be determined by assessing the effects of the polynucleotides of the present invention on target malignant or abnormally proliferating cell growth in tissue culture, tumor growth in animals and cell cultures, or any other method known to one of ordinary skill in the art.

[0453] The present invention is further directed to antibody-based therapies which involve administering of anti-polypeptides and anti-polynucleotide antibodies to a mammalian, preferably human, patient for treating one or more of the described diseases, disorders, and/or conditions. Methods for producing anti-polypeptides and anti-polynucleotide antibodies polyclonal and monoclonal antibodies are described in detail elsewhere herein. Such antibodies may be provided in pharmaceutically acceptable compositions as known in the art or as described herein.

[0454] A summary of the ways in which the antibodies of the present invention may be used therapeutically includes binding polynucleotides or polypeptides of the present invention locally or systemically in the body or by direct cytotoxicity of the antibody, e.g., as mediated by complement (CDC) or by effector cells (ADCC). Some of these approaches are described in more detail below. Armed with the teachings provided herein, one of ordinary skill in the art will know how to use the antibodies of the present invention for diagnostic, monitoring or therapeutic purposes without undue experimentation.

[0455] In particular, the antibodies, fragments and derivatives of the present invention are useful for treating a subject having or developing cell proliferative and/or differentiation diseases, disorders, and/or conditions as described herein. Such treatment comprises administering a single or multiple doses of the antibody, or a fragment, derivative, or a conjugate thereof.

[0456] The antibodies of this invention may be advantageously utilized in combination with other monoclonal or chimeric antibodies, or with lymphokines or hematopoietic growth factors, for example, which serve to increase the number or activity of effector cells which interact with the antibodies.

[0457] It is preferred to use high affinity and/or potent in vivo inhibiting and/or neutralizing antibodies against polypeptides or polynucleotides of the present invention, fragments or regions thereof, for both immunoassays directed to and therapy of diseases, disorders, and/or conditions related to polynucleotides or polypeptides, including fragments thereof, of the present invention. Such antibodies, fragments, or regions, will preferably have an affinity for polynucleotides or polypeptides, including fragments thereof. Preferred binding affinities include those with a dissociation constant or Kd less than 5×10⁻⁶M, 10⁻⁶M, 5×10⁻⁷M, 10⁻⁷M, 5×10⁻⁸M, 10⁻⁸M, 5×10⁻⁹M, 10⁻⁹M, 5×10⁻¹⁰M, 10⁻¹⁰M, 5×10⁻¹¹M, 10⁻¹¹M, 5×10⁻¹²M, 10⁻¹²M, 5×10⁻¹³M, 10⁻¹³M, 5×10⁻¹⁴M, 10⁻¹⁴M, 5×10⁻¹⁵M, and 10⁻¹⁵M.

[0458] Moreover, cancer antigen polypeptides of the present invention or fragments thereof, are useful in inhibiting the angiogenesis of proliferative cells or tissues, either alone, as a protein fusion, or in combination with other polypeptides directly or indirectly, as described elsewhere herein. In a most preferred embodiment, said anti-angiogenesis effect may be achieved indirectly, for example, through the inhibition of hematopoietic, tumor-specific cells, such as tumor-associated macrophages (see, e.g., Joseph IB, et al. J Natl Cancer Inst, 90(21):1648-53 (1998), which is hereby incorporated by reference). Antibodies directed to polypeptides or polynucleotides of the present invention may also result in inhibition of angiogenesis directly, or indirectly (see, e.g., Witte L, et al., Cancer Metastasis Rev. 17(2):155-61 (1998), which is hereby incorporated by reference)).

[0459] Polypeptides, including protein fusions, of the present invention, or fragments thereof may be useful in inhibiting proliferative cells or tissues through the induction of apoptosis. Said polypeptides may act either directly, or indirectly to induce apoptosis of proliferative cells and tissues, for example in the activation of a death-domain receptor, such as tumor necrosis factor (TNF) receptor-1, CD95 (Fas/APO-1), TNF-receptor-related apoptosis-mediated protein (TRAMP) and TNF-related apoptosis-inducing ligand (TRAIL) receptor-1 and -2 (see, e.g., Schulze-Osthoff K, et.al., Eur J Biochem 254(3):439-59 (1998), which is hereby incorporated by reference). Moreover, in another preferred embodiment of the present invention, said polypeptides may induce apoptosis through other mechanisms, such as in the activation of other proteins which will activate apoptosis, or through stimulating the expression of said proteins, either alone or in combination with small molecule drugs or adjuvants, such as apoptonin, galectins, thioredoxins, antiinflammatory proteins (See for example, Mutat. Res. 400(1-2):447-55 (1998), Med Hypotheses.50(5):423-33 (1998), Chem. Biol. Interact. Apr 24;111-112:23-34 (1998), J. Mo. Med. 76(6):402-12 (1998), Int. J. Tissue React. 20(1):3-15 (1998), which are all hereby incorporated by reference).

[0460] Polypeptides, including protein fusions to, or fragments thereof, of the present invention are useful in inhibiting the metastasis of proliferative cells or tissues. Inhibition may occur as a direct result of administering polypeptides, or antibodies directed to said polypeptides as described elsewhere herein, or indirectly, such as activating the expression of proteins known to inhibit metastasis, for example alpha 4 integrins, (See, e.g., Curr Top Microbiol Immunol 1998;231:125-41, which is hereby incorporated by reference). Such therapeutic affects of the present invention may be achieved either alone, or in combination with small molecule drugs or adjuvants.

[0461] In another embodiment, the invention provides a method of delivering compositions containing the polypeptides of the invention (e.g., compositions containing polypeptides or anti-cancer antigen polypeptide antibodies associated with heterologous polypeptides, heterologous nucleic acids, toxins, or prodrugs) to targeted cells expressing the polypeptide of the present invention. Cancer antigen polypeptides or anti-cancer antigen polypeptide antibodies of the invention may be associated with heterologous polypeptides, heterologous nucleic acids, toxins, or prodrugs via hydrophobic, hydrophilic, ionic and/or covalent interactions.

[0462] Polypeptides, protein fusions to, or fragments thereof, of the present invention are useful in enhancing the immunogenicity and/or antigenicity of proliferating cells or tissues, either directly, such as would occur if the polypeptides of the present invention ‘vaccinated’ the immune response to respond to proliferative antigens and immunogens, or indirectly, such as in activating the expression of proteins known to enhance the immune response (e.g. chemokines), to said antigens and immunogens.

[0463] Endocrine Disorders

[0464] Polynucleotides or polypeptides, or agonists or antagonists of the present invention, may be used to treat, prevent, diagnose, and/or prognose disorders and/or diseases related to hormone imbalance, and/or disorders or diseases of the endocrine system.

[0465] Hormones secreted by the glands of the endocrine system control physical growth, sexual function, metabolism, and other functions. Disorders may be classified in two ways: disturbances in the production of hormones, and the inability of tissues to respond to hormones. The etiology of these hormone imbalance or endocrine system diseases, disorders or conditions may be genetic, somatic, such as cancer and some autoimmune diseases, acquired (e.g., by chemotherapy, injury or toxins), or infectious. Moreover, polynucleotides, polypeptides, antibodies, and/or agonists or antagonists of the present invention can be used as a marker or detector of a particular disease or disorder related to the endocrine system and/or hormone imbalance.

[0466] Endocrine system and/or hormone imbalance and/or diseases encompass disorders of uterine motility including, but not limited to: complications with pregnancy and labor (e.g., pre-term labor, post-term pregnancy, spontaneous abortion, and slow or stopped labor); and disorders and/or diseases of the menstrual cycle (e.g., dysmenorrhea and endometriosis).

[0467] Endocrine system and/or hormone imbalance disorders and/or diseases include disorders and/or diseases of the pancreas, such as, for example, diabetes mellitus, diabetes insipidus, congenital pancreatic agenesis, pheochromocytoma—islet cell tumor syndrome; disorders and/or diseases of the adrenal glands such as, for example, Addison's Disease, corticosteroid deficiency, virilizing disease, hirsutism, Cushing's Syndrome, hyperaldosteronism, pheochromocytoma; disorders and/or diseases of the pituitary gland, such as, for example, hyperpituitarism, hypopituitarism, pituitary dwarfism, pituitary adenoma, panhypopituitarism, acromegaly, gigantism; disorders and/or diseases of the thyroid, including but not limited to, hyperthyroidism, hypothyroidism, Plummer's disease, Graves' disease (toxic diffuse goiter), toxic nodular goiter, thyroiditis (Hashimoto's thyroiditis, subacute granulomatous thyroiditis, and silent lymphocytic thyroiditis), Pendred's syndrome, myxedema, cretinism, thyrotoxicosis, thyroid hormone coupling defect, thymic aplasia, Hurthle cell tumours of the thyroid, thyroid cancer, thyroid carcinoma, Medullary thyroid carcinoma; disorders and/or diseases of the parathyroid, such as, for example, hyperparathyroidism, hypoparathyroidism; disorders and/or diseases of the hypothalamus.

[0468] In addition, endocrine system and/or hormone imbalance disorders and/or diseases may also include disorders and/or diseases of the testes or ovaries, including cancer. Other disorders and/or diseases of the testes or ovaries further include, for example, ovarian cancer, polycystic ovary syndrome, Klinefelter's syndrome, vanishing testes syndrome (bilateral anorchia), congenital absence of Leydig's cells, cryptorchidism, Noonan's syndrome, myotonic dystrophy, capillary haemangioma of the testis (benign), neoplasias of the testis and neo-testis.

[0469] Moreover, endocrine system and/or hormone imbalance disorders and/or diseases may also include disorders and/or diseases such as, for example, polyglandular deficiency syndromes, pheochromocytoma, neuroblastoma, multiple Endocrine neoplasia, and disorders and/or cancers of endocrine tissues.

[0470] In another embodiment, a polypeptide of the invention, or polynucleotides, antibodies, agonists, or antagonists corresponding to that polypeptide, may be used to diagnose, prognose, prevent, and/or treat endocrine diseases and/or disorders associated with the tissue(s) in which the polypeptide of the invention is expressed, including one, two, three, four, five, or more tissues disclosed in Table 1, column 10 (Tissue(s)).

[0471] Immune Activity

[0472] Polynucleotides, polypeptides, antibodies, and/or agonists or antagonists of the present invention may be useful in treating, preventing, diagnosing and/or prognosing diseases, disorders, and/or conditions of the immune system, by, for example, activating or inhibiting the proliferation, differentiation, or mobilization (chemotaxis) of immune cells. Immune cells develop through a process called hematopoiesis, producing myeloid (platelets, red blood cells, neutrophils, and macrophages) and lymphoid (B and T lymphocytes) cells from pluripotent stem cells. The etiology of these immune diseases, disorders, and/or conditions may be genetic, somatic, such as cancer and some autoimmune diseases, acquired (e.g., by chemotherapy or toxins), or infectious. Moreover, polynucleotides, polypeptides, antibodies, and/or agonists or antagonists of the present invention can be used as a marker or detector of a particular immune system disease or disorder.

[0473] In another embodiment, a polypeptide of the invention, or polynucleotides, antibodies, agonists, or antagonists corresponding to that polypeptide, may be used to treat diseases and disorders of the immune system and/or to inhibit or enhance an immune response generated by cells associated with the tissue(s) in which the polypeptide of the invention is expressed, including one, two, three, four, five, or more tissues disclosed in Table 1, column 10 (Tissue(s)).

[0474] Polynucleotides, polypeptides, antibodies, and/or agonists or antagonists of the present invention may be useful in treating, preventing, diagnosing, and/or prognosing immunodeficiencies, including both congenital and acquired immunodeficiencies. Examples of B cell immunodeficiencies in which immunoglobulin levels B cell function and/or B cell numbers are decreased include: X-linked agammaglobulinemia (Bruton's disease), X-linked infantile agammaglobulinemia, X-linked immunodeficiency with hyper IgM, non X-linked immunodeficiency with hyper IgM, X-linked lymphoproliferative syndrome (XLP), agammaglobulinemia including congenital and acquired agammaglobulinemia, adult onset agammaglobulinemia, late-onset agammaglobulinemia, dysgammaglobulinemia, hypogammaglobulinemia, unspecified hypogammaglobulinemia, recessive agammaglobulinemia (Swiss type), Selective IgM deficiency, selective IgA deficiency, selective IgG subclass deficiencies, IgG subclass deficiency (with or without IgA deficiency), Ig deficiency with increased IgM, IgG and IgA deficiency with increased IgM, antibody deficiency with normal or elevated Igs, Ig heavy chain deletions, kappa chain deficiency, B cell lymphoproliferative disorder (BLPD), common variable immunodeficiency (CVID), common variable immunodeficiency (CVI) (acquired), and transient hypogammaglobulinemia of infancy.

[0475] In specific embodiments, ataxia-telangiectasia or conditions associated with ataxia-telangiectasia are treated, prevented, diagnosed, and/or prognosing using the polypeptides or polynucleotides of the invention, and/or agonists or antagonists thereof.

[0476] Examples of congenital immunodeficiencies in which T cell and/or B cell function and/or number is decreased include, but are not limited to: DiGeorge anomaly, severe combined immunodeficiencies (SCID) (including, but not limited to, X-linked SCID, autosomal recessive SCID, adenosine deaminase deficiency, purine nucleoside phosphorylase (PNP) deficiency, Class II MHC deficiency (Bare lymphocyte syndrome), Wiskott-Aldrich syndrome, and ataxia telangiectasia), thymic hypoplasia, third and fourth pharyngeal pouch syndrome, 22q11.2 deletion, chronic mucocutaneous candidiasis, natural killer cell deficiency (NK), idiopathic CD4+ T-lymphocytopenia, immunodeficiency with predominant T cell defect (unspecified), and unspecified immunodeficiency of cell mediated immunity.

[0477] In specific embodiments, DiGeorge anomaly or conditions associated with DiGeorge anomaly are treated, prevented, diagnosed, and/or prognosed using polypeptides or polynucleotides of the invention, or antagonists or agonists thereof.

[0478] Other immunodeficiencies that may be treated, prevented, diagnosed, and/or prognosed using polypeptides or polynucleotides of the invention, and/or agonists or antagonists thereof, include, but are not limited to, chronic granulomatous disease, Chediak-Higashi syndrome, myeloperoxidase deficiency, leukocyte glucose-6-phosphate dehydrogenase deficiency, X-linked lymphoproliferative syndrome (XLP), leukocyte adhesion deficiency, complement component deficiencies (including Cl, C2, C3, C4, C5, C6, C7, C8 and/or C9 deficiencies), reticular dysgenesis, thymic alymphoplasia-aplasia, immunodeficiency with thymoma, severe congenital leukopenia, dysplasia with immunodeficiency, neonatal neutropenia, short limbed dwarfism, and Nezelof syndrome-combined immunodeficiency with Igs.

[0479] In a preferred embodiment, the immunodeficiencies and/or conditions associated with the immunodeficiencies recited above are treated, prevented, diagnosed and/or prognosed using polynucleotides, polypeptides, antibodies, and/or agonists or antagonists of the present invention.

[0480] In a preferred embodiment polynucleotides, polypeptides, antibodies, and/or agonists or antagonists of the present invention could be used as an agent to boost immunoresponsiveness among immunodeficient individuals. In specific embodiments, polynucleotides, polypeptides, antibodies, and/or agonists or antagonists of the present invention could be used as an agent to boost immunoresponsiveness among B cell and/or T cell immunodeficient individuals.

[0481] The polynucleotides, polypeptides, antibodies, and/or agonists or antagonists of the present invention may be useful in treating, preventing, diagnosing and/or prognosing autoimmune disorders. Many autoimmune disorders result from inappropriate recognition of self as foreign material by immune cells. This inappropriate recognition results in an immune response leading to the destruction of the host tissue. Therefore, the administration of polynucleotides and polypeptides of the invention that can inhibit an immune response, particularly the proliferation, differentiation, or chemotaxis of T-cells, may be an effective therapy in preventing autoimmune disorders.

[0482] Autoimmune diseases or disorders that may be treated, prevented, diagnosed and/or prognosed by polynucleotides, polypeptides, antibodies, and/or agonists or antagonists of the present invention include, but are not limited to, one or more of the following: systemic lupus erythematosus, rheumatoid arthritis, ankylosing spondylitis, multiple sclerosis, autoimmune thyroiditis, Hashimoto's thyroiditis, autoimmune hemolytic anemia, hemolytic anemia, thrombocytopenia, autoimmune thrombocytopenia purpura, autoimmune neonatal thrombocytopenia, idiopathic thrombocytopenia purpura, purpura (e.g., Henloch-Scoenlein purpura), autoimmunocytopenia, Goodpasture's syndrome, Pemphigus vulgaris, myasthenia gravis, Grave's disease (hyperthyroidism), and insulin-resistant diabetes mellitus.

[0483] Additional disorders that are likely to have an autoimmune component that may be treated, prevented, and/or diagnosed with the compositions of the invention include, but are not limited to, type II collagen-induced arthritis, antiphospholipid syndrome, dermatitis, allergic encephalomyelitis, myocarditis, relapsing polychondritis, rheumatic heart disease, neuritis, uveitis ophthalmia, polyendocrinopathies, Reiter's Disease, Stiff-Man Syndrome, autoimmune pulmonary inflammation, autism, Guillain-Barre Syndrome, insulin dependent diabetes mellitus, and autoimmune inflammatory eye disorders.

[0484] Additional disorders that are likely to have an autoimmune component that may be treated, prevented, diagnosed and/or prognosed with the compositions of the invention include, but are not limited to, scleroderma with anti-collagen antibodies (often characterized, e.g., by nucleolar and other nuclear antibodies), mixed connective tissue disease (often characterized, e.g., by antibodies to extractable nuclear antigens (e.g., ribonucleoprotein)), polymyositis (often characterized, e.g., by nonhistone ANA), pernicious anemia (often characterized, e.g., by antiparietal cell, microsomes, and intrinsic factor antibodies), idiopathic Addison's disease (often characterized, e.g., by humoral and cell-mediated adrenal cytotoxicity, infertility (often characterized, e.g., by antispermatozoal antibodies), glomerulonephritis (often characterized, e.g., by glomerular basement membrane antibodies or immune complexes), bullous pemphigoid (often characterized, e.g., by IgG and complement in basement membrane), Sjogren's syndrome (often characterized, e.g., by multiple tissue antibodies, and/or a specific nonhistone ANA (SS-B)), diabetes mellitus (often characterized, e.g., by cell-mediated and humoral islet cell antibodies), and adrenergic drug resistance (including adrenergic drug resistance with asthma or cystic fibrosis) (often characterized, e.g., by beta-adrenergic receptor antibodies).

[0485] Additional disorders that may have an autoimmune component that may be treated, prevented, diagnosed and/or prognosed with the compositions of the invention include, but are not limited to, chronic active hepatitis (often characterized, e.g., by smooth muscle antibodies), primary biliary cirrhosis (often characterized, e.g., by mitochondria antibodies), other endocrine gland failure (often characterized, e.g., by specific tissue antibodies in some cases), vitiligo (often characterized, e.g., by melanocyte antibodies), vasculitis (often characterized, e.g., by Ig and complement in vessel walls and/or low serum complement), post-MI (often characterized, e.g., by myocardial antibodies), cardiotomy syndrome (often characterized, e.g., by myocardial antibodies), urticaria (often characterized, e.g., by IgG and IgM antibodies to IgE), atopic dermatitis (often characterized, e.g., by IgG and IgM antibodies to IgE), asthma (often characterized, e.g., by IgG and IgM antibodies to IgE), and many other inflammatory, granulomatous, degenerative, and atrophic disorders.

[0486] In a preferred embodiment, the autoimmune diseases and disorders and/or conditions associated with the diseases and disorders recited above are treated, prevented, diagnosed and/or prognosed using for example, antagonists or agonists, polypeptides or polynucleotides, or antibodies of the present invention. In a specific preferred embodiment, rheumatoid arthritis is treated, prevented, and/or diagnosed using polynucleotides, polypeptides, antibodies, and/or agonists or antagonists of the present invention.

[0487] In another specific preferred embodiment, systemic lupus erythematosus is treated, prevented, and/or diagnosed using polynucleotides, polypeptides, antibodies, and/or agonists or antagonists of the present invention. In another specific preferred embodiment, idiopathic thrombocytopenia purpura is treated, prevented, and/or diagnosed using polynucleotides, polypeptides, antibodies, and/or agonists or antagonists of the present invention.

[0488] In another specific preferred embodiment IgA nephropathy is treated, prevented, and/or diagnosed using polynucleotides, polypeptides, antibodies, and/or agonists or antagonists of the present invention.

[0489] In a preferred embodiment, the autoimmune diseases and disorders and/or conditions associated with the diseases and disorders recited above are treated, prevented, diagnosed and/or prognosed using polynucleotides, polypeptides, antibodies, and/or agonists or antagonists of the present invention.

[0490] In preferred embodiments, polypeptides, antibodies, polynucleotides and/or agonists or antagonists of the present invention are used as a immunosuppressive agent(s).

[0491] Polynucleotides, polypeptides, antibodies, and/or agonists or antagonists of the present invention may be useful in treating, preventing, prognosing, and/or diagnosing diseases, disorders, and/or conditions of hematopoietic cells. Polynucleotides, polypeptides, antibodies, and/or agonists or antagonists of the present invention could be used to increase differentiation and proliferation of hematopoietic cells, including the pluripotent stem cells, in an effort to treat or prevent those diseases, disorders, and/or conditions associated with a decrease in certain (or many) types hematopoietic cells, including but not limited to, leukopenia, neutropenia, anemia, and thrombocytopenia. Alternatively, Polynucleotides, polypeptides, antibodies, and/or agonists or antagonists of the present invention could be used to increase differentiation and proliferation of hematopoietic cells, including the pluripotent stem cells, in an effort to treat or prevent those diseases, disorders, and/or conditions associated with an increase in certain (or many) types of hematopoietic cells, including but not limited to, histiocytosis.

[0492] Allergic reactions and conditions, such as asthma (particularly allergic asthma) or other respiratory problems, may also be treated, prevented, diagnosed and/or prognosed using polypeptides, antibodies, or polynucleotides of the invention, and/or agonists or antagonists thereof. Moreover, these molecules can be used to treat, prevent, prognose, and/or diagnose anaphylaxis, hypersensitivity to an antigenic molecule, or blood group incompatibility.

[0493] Additionally, polypeptides or polynucleotides of the invention, and/or agonists or antagonists thereof, may be used to treat, prevent, diagnose and/or prognose IgE-mediated allergic reactions. Such allergic reactions include, but are not limited to, asthma, rhinitis, and eczema. In specific embodiments, polynucleotides, polypeptides, antibodies, and/or agonists or antagonists of the present invention may be used to modulate IgE concentrations in vitro or in vivo.

[0494] Moreover, polynucleotides, polypeptides, antibodies, and/or agonists or antagonists of the present invention have uses in the diagnosis, prognosis, prevention, and/or treatment of inflammatory conditions. For example, since polypeptides, antibodies, or polynucleotides of the invention, and/or agonists or antagonists of the invention may inhibit the activation, proliferation and/or differentiation of cells involved in an inflammatory response, these molecules can be used to prevent and/or treat chronic and acute inflammatory conditions. Such inflammatory conditions include, but are not limited to, for example, inflammation associated with infection (e.g., septic shock, sepsis, or systemic inflammatory response syndrome), ischemia-reperfusion injury, endotoxin lethality, complement-mediated hyperacute rejection, nephritis, cytokine or chemokine induced lung injury, inflammatory bowel disease, Crohn's disease, over production of cytokines (e.g., TNF or IL-1.), respiratory disorders (e.g., asthma and allergy); gastrointestinal disorders (e.g., inflammatory bowel disease); cancers (e.g., gastric, ovarian, lung, bladder, liver, and breast); CNS disorders (e.g., multiple sclerosis; ischemic brain injury and/or stroke, traumatic brain injury, neurodegenerative disorders (e.g., Parkinson's disease and Alzheimer's disease); AIDS-related dementia; and prion disease); cardiovascular disorders (e.g., atherosclerosis, myocarditis, cardiovascular disease, and cardiopulmonary bypass complications); as well as many additional diseases, conditions, and disorders that are characterized by inflammation (e.g., hepatitis, rheumatoid arthritis, gout, trauma, pancreatitis, sarcoidosis, dermatitis, renal ischemia-reperfusion injury, Grave's disease, systemic lupus erythematosus, diabetes mellitus, and allogenic transplant rejection).

[0495] Because inflammation is a fundamental defense mechanism, inflammatory disorders can effect virtually any tissue of the body. Accordingly, polynucleotides, polypeptides, and antibodies of the invention, as well as agonists or antagonists thereof, have uses in the treatment of tissue-specific inflammatory disorders, including, but not limited to, adrenalitis, alveolitis, angiocholecystitis, appendicitis, balanitis, blepharitis, bronchitis, bursitis, carditis, cellulitis, cervicitis, cholecystitis, chorditis, cochlitis, colitis, conjunctivitis, cystitis, dermatitis, diverticulitis, encephalitis, endocarditis, esophagitis, eustachitis, fibrositis, folliculitis, gastritis, gastroenteritis, gingivitis, glossitis, hepatosplenitis, keratitis, labyrinthitis, laryngitis, lymphangitis, mastitis, media otitis, meningitis, metritis, mucitis, myocarditis, myosititis, myringitis, nephritis, neuritis, orchitis, osteochondritis, otitis, pericarditis, peritendonitis, peritonitis, pharyngitis, phlebitis, poliomyelitis, prostatitis, pulpitis, retinitis, rhinitis, salpingitis, scleritis, sclerochoroiditis, scrotitis, sinusitis, spondylitis, steatitis, stomatitis, synovitis, syringitis, tendonitis, tonsillitis, urethritis, and vaginitis.

[0496] In specific embodiments, polypeptides, antibodies, or polynucleotides of the invention, and/or agonists or antagonists thereof, are useful to diagnose, prognose, prevent, and/or treat organ transplant rejections and graft-versus-host disease. Organ rejection occurs by host immune cell destruction of the transplanted tissue through an immune response. Similarly, an immune response is also involved in GVHD, but, in this case, the foreign transplanted immune cells destroy the host tissues. Polypeptides, antibodies, or polynucleotides of the invention, and/or agonists or antagonists thereof, that inhibit an immune response, particularly the activation, proliferation, differentiation, or chemotaxis of T-cells, may be an effective therapy in preventing organ rejection or GVHD. In specific embodiments, polypeptides, antibodies, or polynucleotides of the invention, and/or agonists or antagonists thereof, that inhibit an immune response, particularly the activation, proliferation, differentiation, or chemotaxis of T-cells, may be an effective therapy in preventing experimental allergic and hyperacute xenograft rejection.

[0497] In other embodiments, polypeptides, antibodies, or polynucleotides of the invention, and/or agonists or antagonists thereof, are useful to diagnose, prognose, prevent, and/or treat immune complex diseases, including, but not limited to, serum sickness, post streptococcal glomerulonephritis, polyarteritis nodosa, and immune complex-induced vasculitis.

[0498] Polypeptides, antibodies, polynucleotides and/or agonists or antagonists of the invention can be used to treat, detect, and/or prevent infectious agents. For example, by increasing the immune response, particularly increasing the proliferation activation and/or differentiation of B and/or T cells, infectious diseases may be treated, detected, and/or prevented. The immune response may be increased by either enhancing an existing immune response, or by initiating a new immune response. Alternatively, polynucleotides, polypeptides, antibodies, and/or agonists or antagonists of the present invention may also directly inhibit the infectious agent (refer to section of application listing infectious agents, etc), without necessarily eliciting an immune response.

[0499] In another embodiment, polypeptides, antibodies, polynucleotides and/or agonists or antagonists of the present invention are used as a vaccine adjuvant that enhances immune responsiveness to an antigen. In a specific embodiment, polypeptides, antibodies, polynucleotides and/or agonists or antagonists of the present invention are used as an adjuvant to enhance tumor-specific immune responses.

[0500] In another specific embodiment, polypeptides, antibodies, polynucleotides and/or agonists or antagonists of the present invention are used as an adjuvant to enhance anti-viral immune responses. Anti-viral immune responses that may be enhanced using the compositions of the invention as an adjuvant, include virus and virus associated diseases or symptoms described herein or otherwise known in the art. In specific embodiments, the compositions of the invention are used as an adjuvant to enhance an immune response to a virus, disease, or symptom selected from the group consisting of: AIDS, meningitis, Dengue, EBV, and hepatitis (e.g., hepatitis B). In another specific embodiment, the compositions of the invention are used as an adjuvant to enhance an immune response to a virus, disease, or symptom selected from the group consisting of: HIV/AIDS, respiratory syncytial virus, Dengue, rotavirus, Japanese B encephalitis, influenza A and B, parainfluenza, measles, cytomegalovirus, rabies, Junin, Chikungunya, Rift Valley Fever, herpes simplex, and yellow fever.

[0501] In another specific embodiment, polypeptides, antibodies, polynucleotides and/or agonists or antagonists of the present invention are used as an adjuvant to enhance anti-bacterial or anti-fungal immune responses. Anti-bacterial or anti-fungal immune responses that may be enhanced using the compositions of the invention as an adjuvant, include bacteria or fungus and bacteria or fungus associated diseases or symptoms described herein or otherwise known in the art. In specific embodiments, the compositions of the invention are used as an adjuvant to enhance an immune response to a bacteria or fungus, disease, or symptom selected from the group consisting of: tetanus, Diphtheria, botulism, and meningitis type B.

[0502] In another specific embodiment, the compositions of the invention are used as an adjuvant to enhance an immune response to a bacteria or fungus, disease, or symptom selected from the group consisting of: Vibrio cholerae, Mycobacterium leprae, Salmonella typhi, Salmonella paratyphi, Meisseria meningitidis, Streptococcus pneumoniae, Group B streptococcus, Shigella spp., Enterotoxigenic Escherichia coli, Enterohemorrhagic E. coli, and Borrelia burgdorferi.

[0503] In another specific embodiment, polypeptides, antibodies, polynucleotides and/or agonists or antagonists of the present invention are used as an adjuvant to enhance anti-parasitic immune responses. Anti-parasitic immune responses that may be enhanced using the compositions of the invention as an adjuvant, include parasite and parasite associated diseases or symptoms described herein or otherwise known in the art. In specific embodiments, the compositions of the invention are used as an adjuvant to enhance an immune response to a parasite. In another specific embodiment, the compositions of the invention are used as an adjuvant to enhance an immune response to Plasmodium (malaria) or Leishmania.

[0504] In another specific embodiment, polypeptides, antibodies, polynucleotides and/or agonists or antagonists of the present invention may also be employed to treat infectious diseases including silicosis, sarcoidosis, and idiopathic pulmonary fibrosis; for example, by preventing the recruitment and activation of mononuclear phagocytes.

[0505] In another specific embodiment, polypeptides, antibodies, polynucleotides and/or agonists or antagonists of the present invention are used as an antigen for the generation of antibodies to inhibit or enhance immune mediated responses against polypeptides of the invention.

[0506] In one embodiment, polypeptides, antibodies, polynucleotides and/or agonists or antagonists of the present invention are administered to an animal (e.g., mouse, rat, rabbit, hamster, guinea pig, pigs, micro-pig, chicken, camel, goat, horse, cow, sheep, dog, cat, non-human primate, and human, most preferably human) to boost the immune system to produce increased quantities of one or more antibodies (e.g., IgG, IgA, IgM, and IgE), to induce higher affinity antibody production and immunoglobulin class switching (e.g., IgG, IgA, IgM, and IgE), and/or to increase an immune response.

[0507] In another specific embodiment, polypeptides, antibodies, polynucleotides and/or agonists or antagonists of the present invention are used as a stimulator of B cell responsiveness to pathogens.

[0508] In another specific embodiment, polypeptides, antibodies, polynucleotides and/or agonists or antagonists of the present invention are used as an activator of T cells.

[0509] In another specific embodiment, polypeptides, antibodies, polynucleotides and/or agonists or antagonists of the present invention are used as an agent that elevates the immune status of an individual prior to their receipt of immunosuppressive therapies.

[0510] In another specific embodiment, polypeptides, antibodies, polynucleotides and/or agonists or antagonists of the present invention are used as an agent to induce higher affinity antibodies.

[0511] In another specific embodiment, polypeptides, antibodies, polynucleotides and/or agonists or antagonists of the present invention are used as an agent to increase serum immunoglobulin concentrations.

[0512] In another specific embodiment, polypeptides, antibodies, polynucleotides and/or agonists or antagonists of the present invention are used as an agent to accelerate recovery of immunocompromised individuals.

[0513] In another specific embodiment, polypeptides, antibodies, polynucleotides and/or agonists or antagonists of the present invention are used as an agent to boost immunoresponsiveness among aged populations and/or neonates.

[0514] In another specific embodiment, polypeptides, antibodies, polynucleotides and/or agonists or antagonists of the present invention are used as an immune system enhancer prior to, during, or after bone marrow transplant and/or other transplants (e.g., allogeneic or xenogeneic organ transplantation). With respect to transplantation, compositions of the invention may be administered prior to, concomitant with, and/or after transplantation. In a specific embodiment, compositions of the invention are administered after transplantation, prior to the beginning of recovery of T-cell populations. In another specific embodiment, compositions of the invention are first administered after transplantation after the beginning of recovery of T cell populations, but prior to full recovery of B cell populations.

[0515] In another specific embodiment, polypeptides, antibodies, polynucleotides and/or agonists or antagonists of the present invention are used as an agent to boost immunoresponsiveness among individuals having an acquired loss of B cell function. Conditions resulting in an acquired loss of B cell function that may be ameliorated or treated by administering the polypeptides, antibodies, polynucleotides and/or agonists or antagonists thereof, include, but are not limited to, HIV Infection, AIDS, bone marrow transplant, and B cell chronic lymphocytic leukemia (CLL).

[0516] In another specific embodiment, polypeptides, antibodies, polynucleotides and/or agonists or antagonists of the present invention are used as an agent to boost immunoresponsiveness among individuals having a temporary immune deficiency. Conditions resulting in a temporary immune deficiency that may be ameliorated or treated by administering the polypeptides, antibodies, polynucleotides and/or agonists or antagonists thereof, include, but are not limited to, recovery from viral infections (e.g., influenza), conditions associated with malnutrition, recovery from infectious mononucleosis, or conditions associated with stress, recovery from measles, recovery from blood transfusion, and recovery from surgery.

[0517] In another specific embodiment, polypeptides, antibodies, polynucleotides and/or agonists or antagonists of the present invention are used as a regulator of antigen presentation by monocytes, dendritic cells, and/or B-cells. In one embodiment, polynucleotides, polypeptides, antibodies, and/or agonists or antagonists of the present invention enhance antigen presentation or antagonizes antigen presentation in vitro or in vivo. Moreover, in related embodiments, said enhancement or antagonism of antigen presentation may be useful as an anti-tumor treatment or to modulate the immune system.

[0518] In another specific embodiment, polypeptides, antibodies, polynucleotides and/or agonists or antagonists of the present invention are used as an agent to direct an individual's immune system towards development of a humoral response (i.e. TH2) as opposed to a THI cellular response.

[0519] In another specific embodiment, polypeptides, antibodies, polynucleotides and/or agonists or antagonists of the present invention are used as a means to induce tumor proliferation and thus make it more susceptible to anti-neoplastic agents. For example, multiple myeloma is a slowly dividing disease and is thus refractory to virtually all anti-neoplastic regimens. If these cells were forced to proliferate more rapidly their susceptibility profile would likely change.

[0520] In another specific embodiment, polypeptides, antibodies, polynucleotides and/or agonists or antagonists of the present invention are used as a stimulator of B cell production in pathologies such as AIDS, chronic lymphocyte disorder and/or Common Variable Immunodificiency.

[0521] In another specific embodiment, polypeptides, antibodies, polynucleotides and/or agonists or antagonists of the present invention are used as a therapy for generation and/or regeneration of lymphoid tissues following surgery, trauma or genetic defect. In another specific embodiment, polypeptides, antibodies, polynucleotides and/or agonists or antagonists of the present invention are used in the pretreatment of bone marrow samples prior to transplant.

[0522] In another specific embodiment, polypeptides, antibodies, polynucleotides and/or agonists or antagonists of the present invention are used as a gene-based therapy for genetically inherited disorders resulting in immuno-incompetence/immunodeficiency such as observed among SCID patients.

[0523] In another specific embodiment, polypeptides, antibodies, polynucleotides and/or agonists or antagonists of the present invention are used as a means of activating monocytes/macrophages to defend against parasitic diseases that effect monocytes such as Leishmania.

[0524] In another specific embodiment, polypeptides, antibodies, polynucleotides and/or agonists or antagonists of the present invention are used as a means of regulating secreted cytokines that are elicited by polypeptides of the invention.

[0525] In another embodiment, polypeptides, antibodies, polynucleotides and/or agonists or antagonists of the present invention are used in one or more of the applications decribed herein, as they may apply to veterinary medicine.

[0526] In another specific embodiment, polypeptides, antibodies, polynucleotides and/or agonists or antagonists of the present invention are used as a means of blocking various aspects of immune responses to foreign agents or self. Examples of diseases or conditions in which blocking of certain aspects of immune responses may be desired include autoimmune disorders such as lupus, and arthritis, as well as immunoresponsiveness to skin allergies, inflammation, bowel disease, injury and diseases/disorders associated with pathogens.

[0527] In another specific embodiment, polypeptides, antibodies, polynucleotides and/or agonists or antagonists of the present invention are used as a therapy for preventing the B cell proliferation and Ig secretion associated with autoimmune diseases such as idiopathic thrombocytopenic purpura, systemic lupus erythematosus and multiple sclerosis.

[0528] In another specific embodiment, polypeptides, antibodies, polynucleotides and/or agonists or antagonists of the present invention are used as a inhibitor of B and/or T cell migration in endothelial cells. This activity disrupts tissue architecture or cognate responses and is useful, for example in disrupting immune responses, and blocking sepsis.

[0529] In another specific embodiment, polypeptides, antibodies, polynucleotides and/or agonists or antagonists of the present invention are used as a therapy for chronic hypergammaglobulinemia evident in such diseases as monoclonal gammopathy of undetermined significance (MGUS), Waldenstrom's disease, related idiopathic monoclonal gammopathies, and plasmacytomas.

[0530] In another specific embodiment, polypeptides, antibodies, polynucleotides and/or agonists or antagonists of the present invention may be employed for instance to inhibit polypeptide chemotaxis and activation of macrophages and their precursors, and of neutrophils, basophils, B lymphocytes and some T-cell subsets, e.g., activated and CD8 cytotoxic T cells and natural killer cells, in certain autoimmune and chronic inflammatory and infective diseases. Examples of autoimmune diseases are described herein and include multiple sclerosis, and insulin-dependent diabetes.

[0531] The polypeptides, antibodies, polynucleotides and/or agonists or antagonists of the present invention may also be employed to treat idiopathic hyper-eosinophilic syndrome by, for example, preventing eosinophil production and migration.

[0532] In another specific embodiment, polypeptides, antibodies, polynucleotides and/or agonists or antagonists of the present invention are used to enhance or inhibit complement mediated cell lysis.

[0533] In another specific embodiment, polypeptides, antibodies, polynucleotides and/or agonists or antagonists of the present invention are used to enhance or inhibit antibody dependent cellular cytotoxicity.

[0534] In another specific embodiment, polypeptides, antibodies, polynucleotides and/or agonists or antagonists of the present invention may also be employed for treating atherosclerosis, for example, by preventing monocyte infiltration in the artery wall.

[0535] In another specific embodiment, polypeptides, antibodies, polynucleotides and/or agonists or antagonists of the present invention may be employed to treat adult respiratory distress syndrome (ARDS).

[0536] In another specific embodiment, polypeptides, antibodies, polynucleotides and/or agonists or antagonists of the present invention may be useful for stimulating wound and tissue repair, stimulating angiogenesis, and/or stimulating the repair of vascular or lymphatic diseases or disorders. Additionally, agonists and antagonists of the invention may be used to stimulate the regeneration of mucosal surfaces.

[0537] In a specific embodiment, polynucleotides or polypeptides, and/or agonists thereof are used to diagnose, prognose, treat, and/or prevent a disorder characterized by primary or acquired immunodeficiency, deficient serum immunoglobulin production, recurrent infections, and/or immune system dysfunction. Moreover, polynucleotides or polypeptides, and/or agonists thereof may be used to treat or prevent infections of the joints, bones, skin, and/or parotid glands, blood-borne infections (e.g., sepsis, meningitis, septic arthritis, and/or osteomyelitis), autoimmune diseases (e.g., those disclosed herein), inflammatory disorders, and malignancies, and/or any disease or disorder or condition associated with these infections, diseases, disorders and/or malignancies) including, but not limited to, CVID, other primary immune deficiencies, HIV disease, CLL, recurrent bronchitis, sinusitis, otitis media, conjunctivitis, pneumonia, hepatitis, meningitis, herpes zoster (e.g., severe herpes zoster), and/or pneumocystis carnii. Other diseases and disorders that may be prevented, diagnosed, prognosed, and/or treated with polynucleotides or polypeptides, and/or agonists of the present invention include, but are not limited to, HIV infection, HTLV-BLV infection, lymphopenia, phagocyte bactericidal dysfunction anemia, thrombocytopenia, and hemoglobinuria.

[0538] In another embodiment, polynucleotides, polypeptides, antibodies, and/or agonists or antagonists of the present invention are used to treat, and/or diagnose an individual having common variable immunodeficiency disease (“CVID”; also known as “acquired agammaglobulinemia” and “acquired hypogammaglobulinemia”) or a subset of this disease.

[0539] In a specific embodiment, polynucleotides, polypeptides, antibodies, and/or agonists or antagonists of the present invention may be used to diagnose, prognose, prevent, and/or treat cancers or neoplasms including immune cell or immune tissue-related cancers or neoplasms. Examples of cancers or neoplasms that may be prevented, diagnosed, or treated by polynucleotides, polypeptides, antibodies, and/or agonists or antagonists of the present invention include, but are not limited to, acute myelogenous leukemia, chronic myelogenous leukemia, Hodgkin's disease, non-Hodgkin's lymphoma, acute lymphocytic anemia (ALL) Chronic lymphocyte leukemia, plasmacytomas, multiple myeloma, Burkitt's lymphoma, EBV-transformed diseases, and/or diseases and disorders described in the section entitled “Hyperproliferative Disorders” elsewhere herein.

[0540] In another specific embodiment, polypeptides, antibodies, polynucleotides and/or agonists or antagonists of the present invention are used as a therapy for decreasing cellular proliferation of Large B-cell Lymphomas.

[0541] In another specific embodiment, polypeptides, antibodies, polynucleotides and/or agonists or antagonists of the present invention are used as a means of decreasing the involvement of B cells and Ig associated with Chronic Myelogenous Leukemia.

[0542] In specific embodiments, the compositions of the invention are used as an agent to boost immunoresponsiveness among B cell immunodeficient individuals, such as, for example, an individual who has undergone a partial or complete splenectomy.

[0543] Antagonists of the invention include, for example, binding and/or inhibitory antibodies, antisense nucleic acids, ribozymes or soluble forms of the polypeptides of the present invention (e.g., Fc fusion protein; see, e.g., Example 9). Agonists of the invention include, for example, binding or stimulatory antibodies, and soluble forms of the polypeptides (e.g., Fc fusion proteins; see, e.g., Example 9). Polypeptides, antibodies, polynucleotides and/or agonists or antagonists of the present invention may be employed in a composition with a pharmaceutically acceptable carrier, e.g., as described herein.

[0544] In another embodiment, polypeptides, antibodies, polynucleotides and/or agonists or antagonists of the present invention are administered to an animal (including, but not limited to, those listed above, and also including transgenic animals) incapable of producing functional endogenous antibody molecules or having an otherwise compromised endogenous immune system, but which is capable of producing human immunoglobulin molecules by means of a reconstituted or partially reconstituted immune system from another animal (see, e.g., published PCT Application Nos. WO98/24893, WO/9634096, WO/9633735, and WO/91 10741). Administration of polypeptides, antibodies, polynucleotides and/or agonists or antagonists of the present invention to such animals is useful for the generation of monoclonal antibodies against the polypeptides, antibodies, polynucleotides and/or agonists or antagonists of the present invention.

[0545] Blood-Related Disorders

[0546] The polynucleotides, polypeptides, antibodies, and/or agonists or antagonists of the present invention may be used to modulate hemostatic (the stopping of bleeding) or thrombolytic (clot dissolving) activity. For example, by increasing hemostatic or thrombolytic activity, polynucleotides or polypeptides, and/or agonists or antagonists of the present invention could be used to treat or prevent blood coagulation diseases, disorders, and/or conditions (e.g., afibrinogenemia, factor deficiencies, hemophilia), blood platelet diseases, disorders, and/or conditions (e.g., thrombocytopenia), or wounds resulting from trauma, surgery, or other causes. Alternatively, polynucleotides, polypeptides, antibodies, and/or agonists or antagonists of the present invention that can decrease hemostatic or thrombolytic activity could be used to inhibit or dissolve clotting. These molecules could be important in the treatment or prevention of heart attacks (infarction), strokes, or scarring.

[0547] In specific embodiments, the polynucleotides, polypeptides, antibodies, and/or agonists or antagonists of the present invention may be used to prevent, diagnose, prognose, and/or treat thrombosis, arterial thrombosis, venous thrombosis, thromboembolism, pulmonary embolism, atherosclerosis, myocardial infarction, transient ischemic attack, unstable angina. In specific embodiments, the polynucleotides, polypeptides, antibodies, and/or agonists or antagonists of the present invention may be used for the prevention of occulsion of saphenous grafts, for reducing the risk of periprocedural thrombosis as might accompany angioplasty procedures, for reducing the risk of stroke in patients with atrial fibrillation including nonrheumatic atrial fibrillation, for reducing the risk of embolism associated with mechanical heart valves and or mitral valves disease. Other uses for the polynucleotides, polypeptides, antibodies, and/or agonists or antagonists of the present invention, include, but are not limited to, the prevention of occlusions in extrcorporeal devices (e.g., intravascular canulas, vascular access shunts in hemodialysis patients, hemodialysis machines, and cardiopulmonary bypass machines).

[0548] In another embodiment, a polypeptide of the invention, or polynucleotides, antibodies, agonists, or antagonists corresponding to that polypeptide, may be used to prevent, diagnose, prognose, and/or treat diseases and disorders of the blood and/or blood forming organs associated with the tissue(s) in which the polypeptide of the invention is expressed, including one, two, three, four, five, or more tissues disclosed in Table 1, column 10 (Tissue(s)).

[0549] The polynucleotides, polypeptides, antibodies, and/or agonists or antagonists of the present invention may be used to modulate hematopoietic activity (the formation of blood cells). For example, the polynucleotides, polypeptides, antibodies, and/or agonists or antagonists of the present invention may be used to increase the quantity of all or subsets of blood cells, such as, for example, erythrocytes, lymphocytes (B or T cells), myeloid cells (e.g., basophils, eosinophils, neutrophils, mast cells, macrophages) and platelets. The ability to decrease the quantity of blood cells or subsets of blood cells may be useful in the prevention, detection, diagnosis and/or treatment of anemias and leukopenias described below. Alternatively, the polynucleotides, polypeptides, antibodies, and/or agonists or antagonists of the present invention may be used to decrease the quantity of all or subsets of blood cells, such as, for example, erythrocytes, lymphocytes (B or T cells), myeloid cells (e.g., basophils, eosinophils, neutrophils, mast cells, macrophages) and platelets. The ability to decrease the quantity of blood cells or subsets of blood cells may be useful in the prevention, detection, diagnosis and/or treatment of leukocytoses, such as, for example eosinophilia.

[0550] The polynucleotides, polypeptides, antibodies, and/or agonists or antagonists of the present invention may be used to prevent, treat, or diagnose blood dyscrasia.

[0551] Anemias are conditions in which the number of red blood cells or amount of hemoglobin (the protein that carries oxygen) in them is below normal. Anemia may be caused by excessive bleeding, decreased red blood cell production, or increased red blood cell destruction (hemolysis). The polynucleotides, polypeptides, antibodies, and/or agonists or antagonists of the present invention may be useful in treating, preventing, and/or diagnosing anemias. Anemias that may be treated prevented or diagnosed by the polynucleotides, polypeptides, antibodies, and/or agonists or antagonists of the present invention include iron deficiency anemia, hypochromic anemia, microcytic anemia, chlorosis, hereditary siderob;astic anemia, idiopathic acquired sideroblastic anemia, red cell aplasia, megaloblastic anernia (e.g., pernicious anemia, (vitamin B12 deficiency) and folic acid deficiency anemia), aplastic anemia, hemolytic anemias (e.g., autoimmune helolytic anemia, microangiopathic hemolytic anemia, and paroxysmal nocturnal hemoglobinuria). The polynucleotides, polypeptides, antibodies, and/or agonists or antagonists of the present invention may be useful in treating, preventing, and/or diagnosing anemias associated with diseases including but not limited to, anemias associated with systemic lupus erythematosus, cancers, lymphomas, chronic renal disease, and enlarged spleens. The polynucleotides, polypeptides, antibodies, and/or agonists or antagonists of the present invention may be useful in treating, preventing, and/or diagnosing anemias arising from drug treatments such as anemias associated with methyldopa, dapsone, and/or sulfadrugs. Additionally, rhe polynucleotides, polypeptides, antibodies, and/or agonists or antagonists of the present invention may be useful in treating, preventing, and/or diagnosing anemias associated with abnormal red blood cell architecture including but not limited to, hereditary spherocytosis, hereditary elliptocytosis, glucose-6-phosphate dehydrogenase deficiency, and sickle cell anemia.

[0552] The polynucleotides, polypeptides, antibodies, and/or agonists or antagonists of the present invention may be useful in treating, preventing, and/or diagnosing hemoglobin abnormalities, (e.g., those associated with sickle cell anemia, hemoglobin C disease, hemoglobin S-C disease, and hemoglobin E disease). Additionally, the polynucleotides, polypeptides, antibodies, and/or agonists or antagonists of the present invention may be useful in diagnosing, prognosing, preventing, and/or treating thalassemias, including, but not limited to major and minor forms of alpha-thalassemia and beta-thalassemia.

[0553] In another embodiment, the polynucleotides, polypeptides, antibodies, and/or agonists or antagonists of the present invention may be useful in diagnosing, prognosing, preventing, and/or treating bleeding disorders including, but not limited to, thrombocytopenia (e.g., idiopathic thrombocytopenic purpura, and thrombotic thrombocytopenic purpura), Von Willebrand's disease, hereditary platelet disorders (e.g., storage pool disease such as Chediak-Higashi and Hermansky-Pudlak syndromes, thromboxane A2 dysfunction, thromboasthenia, and Bernard-Soulier syndrome), hemolytic-uremic syndrome, hemophelias such as hemophelia A or Factor VII deficiency and Christmas disease or Factor IX deficiency, Hereditary Hemorhhagic Telangiectsia, also known as Rendu-Osler-Weber syndrome, allergic purpura (Henoch Schonlein purpura) and disseminated intravascular coagulation.

[0554] The effect of the polynucleotides, polypeptides, antibodies, and/or agonists or antagonists of the present invention on the clotting time of blood may be monitored using any of the clotting tests known in the art including, but not limited to, whole blood partial thromboplastin time (PTT), the activated partial thromboplastin time (aPTT), the activated clotting time (ACT), the recalcified activated clotting time, or the Lee-White Clotting time.

[0555] Several diseases and a variety of drugs can cause platelet dysfunction. Thus, in a specific embodiment, the polynucleotides, polypeptides, antibodies, and/or agonists or antagonists of the present invention may be useful in diagnosing, prognosing, preventing, and/or treating acquired platelet dysfunction such as platelet dysfunction accompanying kidney failure, leukemia, multiple myeloma, cirrhosis of the liver, and systemic lupus erythematosus as well as platelet dysfunction associated with drug treatments, including treatment with aspirin, ticlopidine, nonsteroidal anti-inflammatory drugs (used for arthritis, pain, and sprains), and penicillin in high doses.

[0556] In another embodiment, the polynucleotides, polypeptides, antibodies, and/or agonists or antagonists of the present invention may be useful in diagnosing, prognosing, preventing, and/or treating diseases and disorders characterized by or associated with increased or decreased numbers of white blood cells. Leukopenia occurs when the number of white blood cells decreases below normal. Leukopenias include, but are not limited to, neutropenia and lymphocytopenia. An increase in the number of white blood cells compared to normal is known as leukocytosis. The body generates increased numbers of white blood cells during infection. Thus, leukocytosis may simply be a normal physiological parameter that reflects infection. Alternatively, leukocytosis may be an indicator of injury or other disease such as cancer. Leokocytoses, include but are not limited to, eosinophilia, and accumulations of macrophages. In specific embodiments, the polynucleotides, polypeptides, antibodies, and/or agonists or antagonists of the present invention may be useful in diagnosing, prognosing, preventing, and/or treating leukopenia. In other specific embodiments, the polynucleotides, polypeptides, antibodies, and/or agonists or antagonists of the present invention may be useful in diagnosing, prognosing, preventing, and/or treating leukocytosis

[0557] Leukopenia may be a generalized decreased in all types of white blood cells, or may be a specific depletion of particular types of white blood cells. Thus, in specific embodiments, the polynucleotides, polypeptides, antibodies, and/or agonists or antagonists of the present invention may be useful in diagnosing, prognosing, preventing, and/or treating decreases in neutrophil numbers, known as neutropenia. Neutropenias that may be diagnosed, prognosed, prevented, and/or treated by the polynucleotides, polypeptides, antibodies, and/or agonists or antagonists of the present invention include, but are not limited to, infantile genetic agranulocytosis, familial neutropenia, cyclic neutropenia, neutropenias resulting from or associated with dietary deficiencies (e.g., vitamin B 12 deficiency or folic acid deficiency), neutropenias resulting from or associated with drug treatments (e.g., antibiotic regimens such as penicillin treatment, sulfonamide treatment, anticoagulant treatment, anticonvulsant drugs, anti-thyroid drugs, and cancer chemotherapy), and neutropenias resulting from increased neutrophil destruction that may occur in association with some bacterial or viral infections, allergic disorders, autoimmune diseases, conditions in which an individual has an enlarged spleen (e.g., Felty syndrome, malaria and sarcoidosis), and some drug treatment regimens.

[0558] The polynucleotides, polypeptides, antibodies, and/or agonists or antagonists of the present invention may be useful in diagnosing, prognosing, preventing, and/or treating lymphocytopenias (decreased numbers of B and/or T lymphocytes), including, but not limited lymphocytopenias resulting from or associated with stress, drug treatments (e.g., drug treatment with corticosteroids, cancer chemotherapies, and/or radiation therapies), AIDS infection and/or other diseases such as, for example, cancer, rheumatoid arthritis, systemic lupus erythematosus, chronic infections, some viral infections and/or hereditary disorders (e.g., DiGeorge syndrome, Wiskott-Aldrich Syndome, severe combined immunodeficiency, ataxia telangiectsia).

[0559] The polynucleotides, polypeptides, antibodies, and/or agonists or antagonists of the present invention may be useful in diagnosing, prognosing, preventing, and/or treating diseases and disorders associated with macrophage numbers and/or macrophage function including, but not limited to, Gaucher's disease, Niemann-Pick disease, Letterer-Siwe disease and Hand-Schuller-Christian disease.

[0560] In another embodiment, the polynucleotides, polypeptides, antibodies, and/or agonists or antagonists of the present invention may be useful in diagnosing, prognosing, preventing, and/or treating diseases and disorders associated with eosinophil numbers and/or eosinophil function including, but not limited to, idiopathic hypereosinophilic syndrome, eosinophilia-myalgia syndrome, and Hand-Schuller-Christian disease.

[0561] In yet another embodiment, the polynucleotides, polypeptides, antibodies, and/or agonists or antagonists of the present invention may be useful in diagnosing, prognosing, preventing, and/or treating leukemias and lymphomas including, but not limited to, acute lymphocytic (lymphpblastic) leukemia (ALL), acute myeloid (myelocytic, myelogenous, myeloblastic, or myelomonocytic) leukemia, chronic lymphocytic leukemia (e.g., B cell leukemias, T cell leukemias, Sezary syndrome, and Hairy cell leukenia), chronic myelocytic (myeloid, myelogenous, or granulocytic) leukemia, Hodgkin's lymphoma, non-hodgkin's lymphoma, Burkitt's lymphoma, and mycosis fungoides.

[0562] In other embodiments, the polynucleotides, polypeptides, antibodies, and/or agonists or antagonists of the present invention may be useful in diagnosing, prognosing, preventing, and/or treating diseases and disorders of plasma cells including, but not limited to, plasma cell dyscrasias, monoclonal gammaopathies, monoclonal gammopathies of undetermined significance, multiple myeloma, macroglobulinemia, Waldenstrom's macroglobulinemia, cryoglobulinemia, and Raynaud's phenomenon.

[0563] In other embodiments, the polynucleotides, polypeptides, antibodies, and/or agonists or antagonists of the present invention may be useful in treating, preventing, and/or diagnosing myeloproliferative disorders, including but not limited to, polycythemia vera, relative polycythemia, secondary polycythemia, myelofibrosis, acute myelofibrosis, agnogenic myelod metaplasia, thrombocythemia, (including both primary and seconday thrombocythemia) and chronic myelocytic leukemia.

[0564] In other embodiments, the polynucleotides, polypeptides, antibodies, and/or agonists or antagonists of the present invention may be useful as a treatment prior to surgery, to increase blood cell production.

[0565] In other embodiments, the polynucleotides, polypeptides, antibodies, and/or agonists or antagonists of the present invention may be useful as an agent to enhance the migration, phagocytosis, superoxide production, antibody dependent cellular cytotoxicity of neutrophils, eosionophils and macrophages.

[0566] In other embodiments, the polynucleotides, polypeptides, antibodies, and/or agonists or antagonists of the present invention may be useful as an agent to increase the number of stem cells in circulation prior to stem cells pheresis. In another specific embodiment, the polynucleotides, polypeptides, antibodies, and/or agonists or antagonists of the present invention may be useful as an agent to increase the number of stem cells in circulation prior to platelet pheresis.

[0567] In other embodiments, the polynucleotides, polypeptides, antibodies, and/or agonists or antagonists of the present invention may be useful as an agent to increase cytokine production.

[0568] In other embodiments, the polynucleotides, polypeptides, antibodies, and/or agonists or antagonists of the present invention may be useful in preventing, diagnosing, and/or treating primary hematopoietic disorders.

[0569] Urinary System Disorders

[0570] Polynucleotides, polypeptides, antibodies, and/or agonists or antagonists of the present invention, may be used to treat, prevent, diagnose, and/or prognose disorders of the urinary system, including but not limited to disorders of the renal system, bladder, ureters, and urethra. Renal disorders include, but are not limited to, kidney failure, nephritis, blood vessel disorders of kidney, metabolic and congenital kidney disorders, urinary disorders of the kidney, autoimmune disorders, sclerosis and necrosis, electrolyte imbalance, and kidney cancers.

[0571] Kidney failure diseases include, but are not limited to, acute kidney failure, chronic kidney failure, atheroembolic renal failure, and end-stage renal disease. Inflammatory diseases of the kidney include acute glomerulonephritis, postinfectious glomerulonephritis, rapidly progressive glomerulonephritis, nephrotic syndrome, membranous glomerulonephritis, familial nephrotic syndrome, membranoproliferative glomerulonephritis I and II, mesangial proliferative glomerulonephritis, chronic glomerulonephritis, acute tubulointerstitial nephritis, chronic tubulointerstitial nephritis, acute post-streptococcal glomerulonephritis (PSGN), pyelonephritis, lupus nephritis, chronic nephritis, interstitial nephritis, and post-streptococcal glomerulonephritis.

[0572] Blood vessel disorders of the kidneys include, but are not limited to, kidney infarction, atheroembolic kidney disease, cortical necrosis, malignant nephrosclerosis, renal vein thrombosis, renal underperfusion, renal ischemia-reperfusion, renal artery embolism, and renal artery stenosis. Kidney disorders resulting form urinary tract problems include, but are not limited to, pyelonephritis, hydronephrosis, urolithiasis (renal lithiasis, nephrolithiasis), reflux nephropathy, urinary tract infections, urinary retention, and acute or chronic unilateral obstructive uropathy.

[0573] Metabolic and congenital disorders of the kidneys include, but are not limited to, renal tubular acidosis, renal glycosuria, nephrogenic diabetes insipidus, cystinuria, Fanconi's syndrome, vitamin D-resistant rickets, Hartnup disease, Bartter's syndrome, Liddle's syndrome, polycystic kidney disease, medullary cystic disease, medullary sponge kidney, Alport's syndrome, nail-patella syndrome, congenital nephrotic syndrome, CRUSH syndrome, horseshoe kidney, diabetic nephropathy, nephrogenic diabetes insipidus, analgesic nephropathy, kidney stones, and membranous nephropathy, Kidney disorders resulting from an autoimmune response include, but are not limited to, systemic lupus erythematosus (SLE), Goodpasture syndrome, IgA nephropathy, and IgM mesangial proliferative glomerulonephritis.

[0574] Sclerotic or necrotic disorders of the kidney include, but are not limited to, glomerulosclerosis, diabetic nephropathy, focal segmental glomerulosclerosis (FSGS), necrotizing glomerulonephritis, and renal papillary necrosis. Kidneys may also develop carcinomas, including, but not limited to, hypemephroma, nephroblastoma, renal cell cancer, transitional cell cancer, squamous cell cancer, and Wilm's tumor.

[0575] Kidney disorders may also result in electrolyte imbalances, including, but not limited to, nephrocalcinosis, pyuria, edema, hydronephritis, proteinuria, hyponatremia, hypernatremia, hypokalemia, hyperkalemia, hypocalcemia, hypercalcemia, hypophosphatemia, and hyperphosphatemia.

[0576] Bladder disorders include, but are not limited to, benign prostatic hyperplasia (BPH), interstitial cystitis (IC), prostatitis, proteinuria, urinary tract infections, urinary incontinence, urinary retention. Disorders of the ureters and urethra include, but are not limited to, acute or chronic unilateral obstructive uropathy. The bladder, ureters, and urethra may also develop carcinomas, including, but not limited to, superficial bladder canccer, invasive bladder cancer, carcinoma of the ureter, and urethra cancers.

[0577] Polypeptides may be administered using any method known in the art, including, but not limited to, direct needle injection at the delivery site, intravenous injection, topical administration, catheter infusion, biolistic injectors, particle accelerators, gelfoam sponge depots, other commercially available depot materials, osmotic pumps, oral or suppositorial solid pharmaceutical formulations, decanting or topical applications during surgery, aerosol delivery. Such methods are known in the art. Polypeptides may be administered as part of a Therapeutic, described in more detail below. Methods of delivering polynucleotides are described in more detail herein.

[0578] Cardiovascular Disorders

[0579] Polynucleotides or polypeptides, or agonists or antagonists of the present invention, may be used to treat, prevent, diagnose, and/or prognose cardiovascular disorders, including, but not limited to, peripheral artery disease, such as limb ischemia.

[0580] Cardiovascular disorders include cardiovascular abnormalities, such as arterio-arterial fistula, arteriovenous fistula, cerebral arteriovenous malformations, congenital heart defects, pulmonary atresia, and Scimitar Syndrome. Congenital heart defects include aortic coarctation, cor triatriatum, coronary vessel anomalies, crisscross heart, dextrocardia, patent ductus arteriosus, Ebstein's anomaly, Eisenmenger complex, hypoplastic left heart syndrome, levocardia, tetralogy of fallot, transposition of great vessels, double outlet right ventricle, tricuspid atresia, persistent truncus arteriosus, total anomalous pulmonary venous connection, hypoplastic left heart syndrome, and heart septal defects, such as aortopulmonary septal defect, endocardial cushion defects, Lutembacher's Syndrome, atrioventricular canal defect, trilogy of Fallot, ventricular heart septal defects.

[0581] Cardiovascular disorders also include heart disease, such as arrhythmias, carcinoid heart disease, high cardiac output, low cardiac output, cardiac tamponade, endocarditis (including bacterial), heart aneurysm, cardiac arrest, sudden cardiac death, congestive heart failure, congestive cardiomyopathy, paroxysmal dyspnea, cardiac edema, heart hypertrophy, congestive cardiomyopathy, left ventricular hypertrophy, right ventricular hypertrophy, post-infarction heart rupture, ventricular septal rupture, heart valve diseases, myocardial diseases, myocardial ischemia, pericardial effusion, pericarditis (including constrictive and tuberculous), pneumopericardium, postpericardiotomy syndrome, pulmonary heart disease, rheumatic heart disease, ventricular dysfunction, hyperemia, cardiovascular pregnancy complications, Scimitar Syndrome, diastolic dysfunction, enlarged heart, heart block, J-curve phenomenon, rheumatic heart disease, Marfan syndrome, cardiovascular syphilis, and cardiovascular tuberculosis.

[0582] Arrhythmias include sinus arrhythmia, atrial fibrillation, atrial flutter, bradycardia, extrasystole, Adams-Stokes Syndrome, bundle-branch block, sinoatrial block, long QT syndrome, parasystole, Lown-Ganong-Levine Syndrome, Mahaim-type pre-excitation syndrome, Wolff-Parkinson-White syndrome, sick sinus syndrome, tachycardias, and ventricular fibrillation. Tachycardias include paroxysmal tachycardia, supraventricular tachycardia, accelerated idioventricular rhythm, atrioventricular nodal reentry tachycardia, ectopic atrial tachycardia, ectopic junctional tachycardia, sinoatrial nodal reentry tachycardia, sinus tachycardia, Torsades de Pointes, and ventricular tachycardia.

[0583] Heart valve disease include aortic valve insufficiency, aortic valve stenosis, heart murmurs, aortic valve prolapse, mitral valve prolapse, tricuspid valve prolapse, mitral valve insufficiency, mitral valve stenosis, pulmonary atresia, pulmonary valve insufficiency, pulmonary valve stenosis, tricuspid atresia, tricuspid valve insufficiency, tricuspid valve stenosis, and bicuspid aortic valve.

[0584] Myocardial diseases include alcoholic cardiomyopathy, congestive cardiomyopathy, hypertrophic cardiomyopathy, aortic subvalvular stenosis, pulmonary subvalvular stenosis, restrictive cardiomyopathy, Chagas cardiomyopathy, endocardial fibroelastosis, endomyocardial fibrosis, Kearns Syndrome, Barth syndrome, myocardial reperfusion injury, and myocarditis.

[0585] Myocardial ischemias include coronary disease, such as angina pectoris, Prinzmetal's angina, unstable angina, coronary aneurysm, coronary arteriosclerosis, coronary thrombosis, coronary vasospasm, myocardial infarction and myocardial stunning.

[0586] Cardiovascular diseases also include vascular diseases such as aneurysms, angiodysplasia, angiomatosis, bacillary angiomatosis, Hippel-Lindau Disease, Klippel-Trenaunay-Weber Syndrome, Sturge-Weber Syndrome, angioneurotic edema, aortic diseases, Takayasu's Arteritis, aortitis, Leriche's Syndrome, arterial occlusive diseases, arteritis, enarteritis, polyarteritis nodosa, cerebrovascular disorders, diabetic angiopathies, diabetic retinopathy, embolisms, thrombosis, erythromelalgia, hemorrhoids, hepatic veno-occlusive disease, hypertension, hypotension (shock), ischemia, peripheral vascular diseases, phlebitis, superficial phlebitis, pulmonary veno-occlusive disease, chronic obstructive pulmonary disease, Buerger's disease, Raynaud's disease, CREST syndrome, retinal vein occlusion, Scimitar syndrome, superior vena cava syndrome, telangiectasia, atacia telangiectasia, hereditary hemorrhagic telangiectasia, deep vein thrombosis, varicocele, varicose veins, varicose ulcer, vasculitis, and venous insufficiency.

[0587] Aneurysms include dissecting aneurysms, false aneurysms, infected aneurysms, ruptured aneurysms, aortic aneurysms, cerebral aneurysms, coronary aneurysms, heart aneurysms, and iliac aneurysms.

[0588] Arterial occlusive diseases include arteriosclerosis, arteriolosclerosis, atherosclerosis, intermittent claudication, carotid stenosis, fibromuscular dysplasias, mesenteric vascular occlusion, Moyamoya disease, renal artery obstruction, retinal artery occlusion, and thromboangiitis obliterans.

[0589] Cerebrovascular disorders include carotid artery diseases, cerebral amyloid angiopathy, cerebral aneurysm, cerebral anoxia, cerebral arteriosclerosis, cerebral arteriovenous malformation, cerebral artery diseases, cerebral embolism and thrombosis, carotid artery thrombosis, sinus thrombosis, Wallenberg's syndrome, cerebral hemorrhage, epidural hematoma, subdural hematoma, subaraxhnoid hemorrhage, cerebral infarction, cerebral ischemia (including transient), subclavian steal syndrome, periventricular leukomalacia, vascular headache, cluster headache, migraine, and vertebrobasilar insufficiency.

[0590] Embolisms include air embolisms, amniotic fluid embolisms, cholesterol embolisms, blue toe syndrome, fat embolisms, pulmonary embolisms, and thromoboembolisms. Thrombosis include coronary thrombosis, hepatic vein thrombosis, deep vein thrombosis, retinal vein occlusion, carotid artery thrombosis, sinus thrombosis, Wallenberg's syndrome, and thrombophlebitis.

[0591] Ischemia includes cerebral ischemia, ischemic colitis, silent ischemia, compartment syndromes, anterior compartment syndrome, myocardial ischemia, reperfusion injuries, and peripheral limb ischemia. Vasculitis includes aortitis, arteritis, Behcet's Syndrome, Churg-Strauss Syndrome, mucocutaneous lymph node syndrome, thromboangiitis obliterans, hypersensitivity vasculitis, Schoenlein-Henoch purpura, allergic cutaneous vasculitis, and Wegener's granulomatosis.

[0592] Cardiovascular diseases can also occur due to electrolyte imbalances that include, but are not limited to hyponatremia, hypematremia, hypokalemia, hyperkalemia, hypocalcemia, hypercalcemia, hypophosphatemia, and hyperphophatemi a. Neoplasm and/or cancers of the cardiovascular system include, but are not limited to, myxomas, fibromas, and rhabdomyomas.

[0593] Polypeptides may be administered using any method known in the art, including, but not limited to, direct needle injection at the delivery site, intravenous injection, topical administration, catheter infusion, biolistic injectors, particle accelerators, gelfoam sponge depots, other commercially available depot materials, osmotic pumps, oral or suppositorial solid pharmaceutical formulations, decanting or topical applications during surgery, aerosol delivery. Such methods are known in the art. Polypeptides may be administered as part of a Therapeutic, described in more detail below. Methods of delivering polynucleotides are described in more detail herein.

[0594] Respiratory Disorders

[0595] Polynucleotides or polypeptides, or agonists or antagonists of the present invention may be used to treat, prevent, diagnose, and/or prognose diseases and/or disorders of the respiratory system.

[0596] Diseases and disorders of the respiratory system include, but are not limited to, nasal vestibulitis, nonallergic rhinitis (e.g., acute rhinitis, chronic rhinitis, atrophic rhinitis, vasomotor rhinitis), nasal polyps, and sinusitis, juvenile angiofibromas, cancer of the nose and juvenile papillomas, vocal cord polyps, nodules (singer's nodules), contact ulcers, vocal cord paralysis, laryngoceles, pharyngitis (e.g., viral and bacterial), tonsillitis, tonsillar cellulitis, parapharyngeal abscess, laryngitis, laryngoceles, and throat cancers (e.g., cancer of the nasopharynx, tonsil cancer, larynx cancer), lung cancer (e.g., squamous cell carcinoma, small cell (oat cell) carcinoma, large cell carcinoma, and adenocarcinoma), allergic disorders (eosinophilic pneumonia, hypersensitivity pneumonitis (e.g., extrinsic allergic alveolitis, allergic interstitial pneumonitis, organic dust pneumoconiosis, allergic bronchopulmonary aspergillosis, asthma, Wegener's granulomatosis (granulomatous vasculitis), Goodpasture's syndrome)), pneumonia (e.g., bacterial pneumonia (e.g., Streptococcus pneumoniae (pneumoncoccal pneumonia), Staphylococcus aureus (staphylococcal pneumonia), Gram-negative bacterial pneumonia (caused by, e.g., Klebsiella and Pseudomas spp.), Mycoplasma pneumoniae pneumonia, Hemophilus influenzae pneumonia, Legionella pneumophila (Legionnaires' disease), and Chlamydia psittaci (Psittacosis)), and viral pneumonia (e.g., influenza, chickenpox (varicella).

[0597] Additional diseases and disorders of the respiratory system include, but are not limited to bronchiolitis, polio (poliomyelitis), croup, respiratory syncytial viral infection, mumps, erythema infectiosum (fifth disease), roseola infantum, progressive rubella panencephalitis, german measles, and subacute sclerosing panencephalitis), fungal pneumonia (e.g., Histoplasmosis, Coccidioidomycosis, Blastomycosis, fungal infections in people with severely suppressed immune systems (e.g., cryptococcosis, caused by Cryptococcus neoformans; aspergillosis, caused by Aspergillus spp.; candidiasis, caused by Candida; and mucormycosis)), Pneumocystis carinii (pneumocystis pneumonia), atypical pneumonias (e.g., Mycoplasma and Chlamydia spp.), opportunistic infection pneumonia, nosocomial pneumonia, chemical pneumonitis, and aspiration pneumonia, pleural disorders (e.g., pleurisy, pleural effusion, and pneumothorax (e.g., simple spontaneous pneumothorax, complicated spontaneous pneumothorax, tension pneumothorax)), obstructive airway diseases (e.g., asthma, chronic obstructive pulmonary disease (COPD), emphysema, chronic or acute bronchitis), occupational lung diseases (e.g., silicosis, black lung (coal workers' pneumoconiosis), asbestosis, berylliosis, occupational asthsma, byssinosis, and benign pneumoconioses), Infiltrative Lung Disease (e.g., pulmonary fibrosis (e.g., fibrosing alveolitis, usual interstitial pneumonia), idiopathic pulmonary fibrosis, desquamative interstitial pneumonia, lymphoid interstitial pneumonia, histiocytosis X (e.g., Letterer-Siwe disease, Hand-Schüller-Christian disease, eosinophilic granuloma), idiopathic pulmonary hemosiderosis, sarcoidosis and pulmonary alveolar proteinosis), Acute respiratory distress syndrome (also called, e.g., adult respiratory distress syndrome), edema, pulmonary embolism, bronchitis (e.g., viral, bacterial), bronchiectasis, atelectasis, lung abscess (caused by, e.g., Staphylococcus aureus or Legionella pneumophila), and cystic fibrosis.

[0598] Anti-Angiogenesis Activity

[0599] The naturally occurring balance between endogenous stimulators and inhibitors of angiogenesis is one in which inhibitory influences predominate. Rastinejad et al., Cell 56:345-355 (1989). In those rare instances in which neovascularization occurs under normal physiological conditions, such as wound healing, organ regeneration, embryonic development, and female reproductive processes, angiogenesis is stringently regulated and spatially and temporally delimited. Under conditions of pathological angiogenesis such as that characterizing solid tumor growth, these regulatory controls fail. Unregulated angiogenesis becomes pathologic and sustains progression of many neoplastic and non-neoplastic diseases. A number of serious diseases are dominated by abnormal neovascularization including solid tumor growth and metastases, arthritis, some types of eye disorders, and psoriasis. See, e.g., reviews by Moses et al., Biotech. 9:630-634 (1991); Folkman et al., N. Engl. J. Med., 333:1757-1763 (1995); Auerbach et al., J. Microvasc. Res. 29:401-411 (1985); Folkman, Advances in Cancer Research, eds. Klein and Weinhouse, Academic Press, New York, pp. 175-203 (1985); Patz, Am. J. Opthalmol. 94:715-743 (1982); and Folkman et al., Science 221:719-725 (1983). In a number of pathological conditions, the process of angiogenesis contributes to the disease state. For example, significant data have accumulated which suggest that the growth of solid tumors is dependent on angiogenesis. Folkman and Klagsbrun, Science 235:442-447 (1987).

[0600] The present invention provides for treatment of diseases or disorders associated with neovascularization by administration of the polynucleotides and/or polypeptides of the invention, as well as agonists or antagonists of the present invention. Malignant and metastatic conditions which can be treated with the polynucleotides and polypeptides, or agonists or antagonists of the invention include, but are not limited to, malignancies, solid tumors, and cancers described herein and otherwise known in the art (for a review of such disorders, see Fishman et al., Medicine, 2d Ed., J. B. Lippincott Co., Philadelphia (1985)). Thus, the present invention provides a method of treating an angiogenesis-related disease and/or disorder, comprising administration to an individual in need thereof a therapeutically effective amount of a polynucleotide, polypeptide, antagonist and/or agonist of the invention. For example, polynucleotides, polypeptides, antagonists and/or agonists may be utilized in a variety of additional methods in order to therapeutically treat a cancer or tumor. Cancers which may be treated with polynucleotides, polypeptides, antagonists and/or agonists include, but are not limited to solid tumors, including prostate, lung, breast, ovarian, stomach, pancreas, larynx, esophagus, testes, liver, parotid, biliary tract, colon, rectum, cervix, uterus, endometrium, kidney, bladder, thyroid cancer; primary tumors and metastases; melanomas; glioblastoma; Kaposi's sarcoma; leiomyosarcoma; non- small cell lung cancer; colorectal cancer; advanced malignancies; and blood born tumors such as leukemias. For example, polynucleotides, polypeptides, antagonists andlor agonists may be delivered topically, in order to treat cancers such as skin cancer, head and neck tumors, breast tumors, and Kaposi's sarcoma.

[0601] Within yet other aspects, polynucleotides, polypeptides, antagonists and/or agonists may be utilized to treat superficial forms of bladder cancer by, for example, intravesical administration. Polynucleotides, polypeptides, antagonists and/or agonists may be delivered directly into the tumor, or near the tumor site, via injection or a catheter. Of course, as the artisan of ordinary skill will appreciate, the appropriate mode of administration will vary according to the cancer to be treated. Other modes of delivery are discussed herein.

[0602] Polynucleotides, polypeptides, antagonists and/or agonists may be useful in treating other disorders, besides cancers, which involve angiogenesis. These disorders include, but are not limited to: benign tumors, for example hemangiomas, acoustic neuromas, neurofibromas, trachomas, and pyogenic granulomas; artheroscleric plaques; ocular angiogenic diseases, for example, diabetic retinopathy, retinopathy of prematurity, macular degeneration, corneal graft rejection, neovascular glaucoma, retrolental fibroplasia, rubeosis, retinoblastoma, uvietis and Pterygia (abnormal blood vessel growth) of the eye; rheumatoid arthritis; psoriasis; delayed wound healing; endometriosis; vasculogenesis; granulations; hypertrophic scars (keloids); nonunion fractures; scleroderma; trachoma; vascular adhesions; myocardial angiogenesis; coronary collaterals; cerebral collaterals; arteriovenous malformations; ischemic limb angiogenesis; Osler-Webber Syndrome; plaque neovascularization; telangiectasia; hemophiliac joints; angiofibroma; fibromuscular dysplasia; wound granulation; Crohn's disease; and atherosclerosis.

[0603] For example, within one aspect of the present invention methods are provided for treating hypertrophic scars and keloids, comprising the step of administering a polynucleotide, polypeptide, antagonist and/or agonist of the invention to a hypertrophic scar or keloid.

[0604] Within one embodiment of the present invention polynucleotides, polypeptides, antagonists and/or agonists of the invention are directly injected into a hypertrophic scar or keloid, in order to prevent the progression of these lesions. This therapy is of particular value in the prophylactic treatment of conditions which are known to result in the development of hypertrophic scars and keloids (e.g., burns), and is preferably initiated after the proliferative phase has had time to progress (approximately 14 days after the initial injury), but before hypertrophic scar or keloid development. As noted above, the present invention also provides methods for treating neovascular diseases of the eye, including for example, corneal neovascularization, neovascular glaucoma, proliferative diabetic retinopathy, retrolental fibroplasia and macular degeneration.

[0605] Moreover, ocular disorders associated with neovascularization which can be treated with the polynucleotides and polypeptides of the present invention (including agonists and/or antagonists) include, but are not limited to: neovascular glaucoma, diabetic retinopathy, retinoblastoma, retrolental fibroplasia, uveitis, retinopathy of prematurity macular degeneration, corneal graft neovascularization, as well as other eye inflammatory diseases, ocular tumors and diseases associated with choroidal or iris neovascularization. See, e.g., reviews by Waltman et al., Am. J. Ophthal. 85:704-710 (1978) and Gartner et al., Surv. Ophthal. 22:291-312 (1978).

[0606] Thus, within one aspect of the present invention methods are provided for treating neovascular diseases of the eye such as corneal neovascularization (including corneal graft neovascularization), comprising the step of administering to a patient a therapeutically effective amount of a compound (as described above) to the cornea, such that the formation of blood vessels is inhibited. Briefly, the cornea is a tissue, which normally lacks blood vessels. In certain pathological conditions however, capillaries may extend into the cornea from the pericorneal vascular plexus of the limbus. When the cornea becomes vascularized, it also becomes clouded, resulting in a decline in the patient's visual acuity. Visual loss may become complete if the cornea completely opacitates. A wide variety of disorders can result in corneal neovascularization, including for example, corneal infections (e.g., trachoma, herpes simplex keratitis, leishmaniasis and onchocerciasis), immunological processes (e.g., graft rejection and Stevens-Johnson's syndrome), alkali burns, trauma, inflammation (of any cause), toxic and nutritional deficiency states, and as a complication of wearing contact lenses.

[0607] Within particularly preferred embodiments of the invention, may be prepared for topical administration in saline (combined with any of the preservatives and antimicrobial agents commonly used in ocular preparations), and administered in eyedrop form. The solution or suspension may be prepared in its pure form and administered several times daily. Alternatively, anti-angiogenic compositions, prepared as described above, may also be administered directly to the cornea. Within preferred embodiments, the anti-angiogenic composition is prepared with a muco-adhesive polymer, which binds to cornea. Within further embodiments, the anti-angiogenic factors or anti-angiogenic compositions may be utilized as an adjunct to conventional steroid therapy. Topical therapy may also be useful prophylactically in corneal lesions which are known to have a high probability of inducing an angiogenic response (such as chemical burns). In these instances the treatment, likely in combination with steroids, may be instituted immediately to help prevent subsequent complications.

[0608] Within other embodiments, the compounds described above may be injected directly into the corneal stroma by an ophthalmologist under microscopic guidance. The preferred site of injection may vary with the morphology of the individual lesion, but the goal of the administration would be to place the composition at the advancing front of the vasculature (i.e., interspersed between the blood vessels and the normal cornea). In most cases this would involve perilimbic corneal injection to “protect” the cornea from the advancing blood vessels. This method may also be utilized shortly after a corneal insult in order to prophylactically prevent corneal neovascularization. In this situation, the material could be injected in the perilimbic cornea interspersed between the corneal lesion and its undesired potential limbic blood supply. Such methods may also be utilized in a similar fashion to prevent capillary invasion of transplanted corneas. In a sustained-release form, injections might only be required 2-3 times per year. A steroid could also be added to the injection solution to reduce inflammation resulting from the injection itself.

[0609] Within another aspect of the present invention, methods are provided for treating neovascular glaucoma, comprising the step of administering to a patient a therapeutically effective amount of a polynucleotide, polypeptide, antagonist and/or agonist to the eye, such that the formation of blood vessels is inhibited. In one embodiment, the compound may be administered topically to the eye in order to treat early forms of neovascular glaucoma. Within other embodiments, the compound may be implanted by injection into the region of the anterior chamber angle. Within other embodiments, the compound may also be placed in any location such that the compound is continuously released into the aqueous humor. Within another aspect of the present invention, methods are provided for treating proliferative diabetic retinopathy, comprising the step of administering to a patient a therapeutically effective amount of a polynucleotide, polypeptide, antagonist and/or agonist to the eyes, such that the formation of blood vessels is inhibited.

[0610] Within particularly preferred embodiments of the invention, proliferative diabetic retinopathy may be treated by injection into the aqueous humor or the vitreous, in order to increase the local concentration of the polynucleotide, polypeptide, antagonist and/or agonist in the retina. Preferably, this treatment should be initiated prior to the acquisition of severe disease requiring photocoagulation.

[0611] Within another aspect of the present invention, methods are provided for treating retrolental fibroplasia, comprising the step of administering to a patient a therapeutically effective amount of a polynucleotide, polypeptide, antagonist and/or agonist to the eye, such that the formation of blood vessels is inhibited. The compound may be administered topically, via intravitreous injection and/or via intraocular implants.

[0612] Additionally, disorders which can be treated with the polynucleotides, polypeptides, agonists and/or agonists include, but are not limited to, hemangioma, arthritis, psoriasis, angiofibroma, atherosclerotic plaques, delayed wound healing, granulations, hemophilic joints, hypertrophic scars, nonunion fractures, Osler-Weber syndrome, pyogenic granuloma, scleroderma, trachoma, and vascular adhesions.

[0613] Moreover, disorders and/or states, which can be treated, prevented, diagnosed and/or prognosed with the polynucleotides, polypeptides, agonists and/or agonists of the invention include, but are not limited to, solid tumors, blood born tumors such as leukemias, tumor metastasis, Kaposi's sarcoma, benign tumors, for example hemangiomas, acoustic neuromas, neurofibromas, trachomas, and pyogenic granulomas, rheumatoid arthritis, psoriasis, ocular angiogenic diseases, for example, diabetic retinopathy, retinopathy of prematurity, macular degeneration, corneal graft rejection, neovascular glaucoma, retrolental fibroplasia, rubeosis, retinoblastoma, and uvietis, delayed wound healing, endometriosis, vascluogenesis, granulations, hypertrophic scars (keloids), nonunion fractures, scleroderma, trachoma, vascular adhesions, myocardial angiogenesis, coronary collaterals, cerebral collaterals, arteriovenous malformations, ischemic limb angiogenesis, Osler-Webber Syndrome, plaque neovascularization, telangiectasia, hemophiliac joints, angiofibroma fibromuscular dysplasia, wound granulation, Crohn's disease, atherosclerosis, birth control agent by preventing vascularization required for embryo implantation controlling menstruation, diseases that have angiogenesis as a pathologic consequence such as cat scratch disease (Rochele minalia quintosa), ulcers (Helicobacter pylori), Bartonellosis and bacillary angiomatosis.

[0614] In one aspect of the birth control method, an amount of the compound sufficient to block embryo implantation is administered before or after intercourse and fertilization have occurred, thus providing an effective method of birth control, possibly a “morning after” method. Polynucleotides, polypeptides, agonists and/or agonists may also be used in controlling menstruation or administered as either a peritoneal lavage fluid or for peritoneal implantation in the treatment of endometriosis.

[0615] Polynucleotides, polypeptides, agonists and/or agonists of the present invention may be incorporated into surgical sutures in order to prevent stitch granulomas.

[0616] Polynucleotides, polypeptides, agonists and/or agonists may be utilized in a wide variety of surgical procedures. For example, within one aspect of the present invention a compositions (in the form of, for example, a spray or film) may be utilized to coat or spray an area prior to removal of a tumor, in order to isolate normal surrounding tissues from malignant tissue, and/or to prevent the spread of disease to surrounding tissues. Within other aspects of the present invention, compositions (e.g., in the form of a spray) may be delivered via endoscopic procedures in order to coat tumors, or inhibit angiogenesis in a desired locale. Within yet other aspects of the present invention, surgical meshes, which have been coated with anti- angiogenic compositions of the present invention may be utilized in any procedure wherein a surgical mesh might be utilized. For example, within one embodiment of the invention a surgical mesh laden with an anti-angiogenic composition may be utilized during abdominal cancer resection surgery (e.g., subsequent to colon resection) in order to provide support to the structure, and to release an amount of the anti-angiogenic factor.

[0617] Within further aspects of the present invention, methods are provided for treating tumor excision sites, comprising administering a polynucleotide, polypeptide, agonist and/or agonist to the resection margins of a tumor subsequent to excision, such that the local recurrence of cancer and the formation of new blood vessels at the site is inhibited. Within one embodiment of the invention, the anti-angiogenic compound is administered directly to the tumor excision site (e.g., applied by swabbing, brushing or otherwise coating the resection margins of the tumor with the anti-angiogenic compound). Alternatively, the anti-angiogenic compounds may be incorporated into known surgical pastes prior to administration. Within particularly preferred embodiments of the invention, the anti-angiogenic compounds are applied after hepatic resections for malignancy, and after neurosurgical operations.

[0618] Within one aspect of the present invention, polynucleotides, polypeptides, agonists and/or agonists may be administered to the resection margin of a wide variety of tumors, including for example, breast, colon, brain and hepatic tumors. For example, within one embodiment of the invention, anti-angiogenic compounds may be administered to the site of a neurological tumor subsequent to excision, such that the formation of new blood vessels at the site are inhibited.

[0619] The polynucleotides, polypeptides, agonists and/or agonists of the present invention may also be administered along with other anti-angiogenic factors. Representative examples of other anti-angiogenic factors include: Anti-Invasive Factor, retinoic acid and derivatives thereof, paclitaxel, Suramin, Tissue Inhibitor of Metalloproteinase-1, Tissue Inhibitor of Metalloproteinase-2, Plasminogen Activator Inhibitor-1, Plasminogen Activator Inhibitor-2, and various forms of the lighter “d group” transition metals.

[0620] Lighter “d group” transition metals include, for example, vanadium, molybdenum, tungsten, titanium, niobium, and tantalum species. Such transition metal species may form transition metal complexes. Suitable complexes of the above-mentioned transition metal species include oxo transition metal complexes.

[0621] Representative examples of vanadium complexes include oxo vanadium complexes such as vanadate and vanadyl complexes. Suitable vanadate complexes include metavanadate and orthovanadate complexes such as, for example, ammonium metavanadate, sodium metavanadate, and sodium orthovanadate. Suitable vanadyl complexes include, for example, vanadyl acetylacetonate and vanadyl sulfate including vanadyl sulfate hydrates such as vanadyl sulfate mono- and trihydrates.

[0622] Representative examples of tungsten and molybdenum complexes also include oxo complexes. Suitable oxo tungsten complexes include tungstate and tungsten oxide complexes. Suitable tungstate complexes include ammonium tungstate, calcium tungstate, sodium tungstate dihydrate, and tungstic acid. Suitable tungsten oxides include tungsten (IV) oxide and tungsten (VI) oxide. Suitable oxo molybdenum complexes include molybdate, molybdenum oxide, and molybdenyl complexes. Suitable molybdate complexes include ammonium molybdate and its hydrates, sodium molybdate and its hydrates, and potassium molybdate and its hydrates. Suitable molybdenum oxides include molybdenum (VI) oxide, molybdenum (VI) oxide, and molybdic acid. Suitable molybdenyl complexes include, for example, molybdenyl acetylacetonate. Other suitable tungsten and molybdenum complexes include hydroxo derivatives derived from, for example, glycerol, tartaric acid, and sugars.

[0623] A wide variety of other anti-angiogenic factors may also be utilized within the context of the present invention. Representative examples include platelet factor 4; protamine sulphate; sulphated chitin derivatives (prepared from queen crab shells), (Murata et al., Cancer Res. 51:22-26 (1991)); Sulphated Polysaccharide Peptidoglycan Complex (SP- PG) (the function of this compound may be enhanced by the presence of steroids such as estrogen, and tamoxifen citrate); Staurosporine; modulators of matrix metabolism, including for example, proline analogs, cishydroxyproline, d,L-3,4-dehydroproline, Thiaproline, alpha,alpha-dipyridyl, aminopropionitrile fumarate; 4-propyl-5-(4-pyridinyl)-2(3H)-oxazolone; Methotrexate; Mitoxantrone; Heparin; Interferons; 2 Macroglobulin-serum; ChIMP-3 (Pavloff et al., J. Bio. Chem. 267:17321-17326 (1992)); Chymostatin (Tomkinson et al., Biochem J. 286:475-480 (1992)); Cyclodextrin Tetradecasulfate; Eponemycin; Camptothecin; Fumagillin (Ingber et al., Nature 348:555-557 (1990)); Gold Sodium Thiomalate (“GST”; Matsubara and Ziff, J. Clin. Invest. 79:1440-1446 (1987)); anticollagenase-serum; alpha2-antiplasmin (Holmes et al., J. Biol. Chem. 262(4):1659-1664 (1987)); Bisantrene (National Cancer Institute); Lobenzarit disodium (N-(2)-carboxyphenyl-4- chloroanthronilic acid disodium or “CCA”; Takeuchi et al., Agents Actions 36:312-316, 1992); Thalidomide; Angostatic steroid; AGM-1470; carboxynaminolmidazole; and metalloproteinase inhibitors such as BB94.

[0624] Musculoskeletal Svstem Disorders

[0625] Polynucleotides, polypeptides, antibodies, and/or agonists or antagonists of the present invention, may be used to treat, prevent, diagnose, and/or prognose disorders of the musculoskeletal system, including but not limited to, disorders of the bone, joints, ligaments, tendons, bursa, muscle, and/or neoplasms and cancers associated with musculoskeletal tissue.

[0626] Diseases or disorders of the bone include, but are not limited to, Albers-Schonberg disease, bowlegs, heel spurs, Kohler's bone disease, knock-knees, Legg-Calve-Perthes disease, Marfan's syndrome, mucopolysaccharidoses, Osgood-Schlatter disease, osteochondroses, osteochondrodysplasia, osteomyelitis, osteopetroses, osteoporosis (postmenopausal, senile, and juvenile), Paget's disease, Scheuermann's disease, scoliosis, Sever's disease, and patellofemoral stress syndrome.

[0627] Joint diseases or disorders include, but are not limited to, ankylosing spondylitis, Behcet's syndrome, CREST syndrome, Ehlers-Danlos syndrome, infectious arthritis, discoid lupus erythematosus, systemic lupus erythematosus, Lyme disease, osteoarthritis, psoriatic arthritis, relapsing polychondrites, Reiter's syndrome, rheumatoid arthritis (adult and juvenile), scleroderma, and Still's disease.

[0628] Diseases or disorders affecting ligaments, tendons, or bursa include, but are not limited to, ankle sprain, bursitis, posterior Achilles tendon bursitis (Haglund's deformity), anterior Achilles tendon bursitis (Albert's disease), tendinitis, tenosynovitis, popieus tendinitis, Achilles tendinitis, medial or lateral epicondylitis, rotator cuff tendinitis, spasmodic torticollis, and fibromyalgia syndrome.

[0629] Muscle diseases or disorders include, but are not limited to, Becker's muscular dystrophy, Duchenne's muscular dystrophy, Landouzy-Dejerine muscular dystrophy, Leyden-Mobius muscular dystrophy, Erb's muscular dystrophy, Charcot's joints, dermatomyositis, gout, pseudogout, glycogen storage diseases, Pompe's disease, mitochondrial myopathy, periodic paralysis, polymyalgia rheumatica, polymyositis, Steinert's disease, Thomsen's disease, anterolateral and posteromedial shin splints, posterior femoral muscle strain, and fibromyositis.

[0630] Musculoskeletal tissue may also develop cancers and/or neoplasms that include, but are not limited to, osteochondroma, benign chondroma, chondroblastoma, chondromyxoid fibroma, osteoid osteoma, giant cell tumor, multiple myeloma, osteosarcoma, fibrosarcoma, malignant fibrous histiocytoma, chondrosarcoma, Ewing's tumor, and malignant lymphoma of bone.

[0631] Neural Activity and Neurological Diseases

[0632] The polynucleotides, polypeptides and agonists or antagonists of the invention may be used for the diagnosis and/or treatment of diseases, disorders, damage or injury of the brain and/or nervous system. Nervous system disorders that can be treated with the compositions of the invention (e.g., polypeptides, polynucleotides, and/or agonists or antagonists), include, but are not limited to, nervous system injuries, and diseases or disorders which result in either a disconnection of axons, a diminution or degeneration of neurons, or demyelination. Nervous system lesions which may be treated in a patient (including human and non-human mammalian patients) according to the methods of the invention, include but are not limited to, the following lesions of either the central (including spinal cord, brain) or peripheral nervous systems: (1) ischemic lesions, in which a lack of oxygen in a portion of the nervous system results in neuronal injury or death, including cerebral infarction or ischemia, or spinal cord infarction or ischemia; (2) traumatic lesions, including lesions caused by physical injury or associated with surgery, for example, lesions which sever a portion of the nervous system, or compression injuries; (3) malignant lesions, in which a portion of the nervous system is destroyed or injured by malignant tissue which is either a nervous system associated malignancy or a malignancy derived from non-nervous system tissue; (4) infectious lesions, in which a portion of the nervous system is destroyed or injured as a result of infection, for example, by an abscess or associated with infection by human immunodeficiency virus, herpes zoster, or herpes simplex virus or with Lyme disease, tuberculosis, or syphilis; (5) degenerative lesions, in which a portion of the nervous system is destroyed or injured as a result of a degenerative process including but not limited to, degeneration associated with Parkinson's disease, Alzheimer's disease, Huntington's chorea, or amyotrophic lateral sclerosis (ALS); (6) lesions associated with nutritional diseases or disorders, in which a portion of the nervous system is destroyed or injured by a nutritional disorder or disorder of metabolism including, but not limited to, vitamin B12 deficiency, folic acid deficiency, Wernicke disease, tobacco-alcohol amblyopia, Marchiafava-Bignami disease (primary degeneration of the corpus callosum), and alcoholic cerebellar degeneration; (7) neurological lesions associated with systemic diseases including, but not limited to, diabetes (diabetic neuropathy, Bell's palsy), systemic lupus erythematosus, carcinoma, or sarcoidosis; (8) lesions caused by toxic substances including alcohol, lead, or particular neurotoxins; and (9) demyelinated lesions in which a portion of the nervous system is destroyed or injured by a demyelinating disease including, but not limited to, multiple sclerosis, human immunodeficiency virus-associated myelopathy, transverse myelopathy or various etiologies, progressive multifocal leukoencephalopathy, and central pontine myelinolysis.

[0633] In one embodiment, the polypeptides, polynucleotides, or agonists or antagonists of the invention are used to protect neural cells from the damaging effects of hypoxia. In a further preferred embodiment, the polypeptides, polynucleotides, or agonists or antagonists of the invention are used to protect neural cells from the damaging effects of cerebral hypoxia. According to this embodiment, the compositions of the invention are used to treat or prevent neural cell injury associated with cerebral hypoxia. In one non-exclusive aspect of this embodiment, the polypeptides, polynucleotides, or agonists or antagonists of the invention, are used to treat or prevent neural cell injury associated with cerebral ischemia. In another non-exclusive aspect of this embodiment, the polypeptides, polynucleotides, or agonists or antagonists of the invention are used to treat or prevent neural cell injury associated with cerebral infarction.

[0634] In another preferred embodiment, the polypeptides, polynucleotides, or agonists or antagonists of the invention are used to treat or prevent neural cell injury associated with a stroke. In a specific embodiment, the polypeptides, polynucleotides, or agonists or antagonists of the invention are used to treat or prevent cerebral neural cell injury associated with a stroke.

[0635] In another preferred embodiment, the polypeptides, polynucleotides, or agonists or antagonists of the invention are used to treat or prevent neural cell injury associated with a heart attack. In a specific embodiment, the polypeptides, polynucleotides, or agonists or antagonists of the invention are used to treat or prevent cerebral neural cell injury associated with a heart attack.

[0636] The compositions of the invention which are useful for treating or preventing a nervous system disorder may be selected by testing for biological activity in promoting the survival or differentiation of neurons. For example, and not by way of limitation, compositions of the invention which elicit any of the following effects may be useful according to the invention: (1) increased survival time of neurons in culture either in the presence or absence of hypoxia or hypoxic conditions; (2) increased sprouting of neurons in culture or in vivo; (3) increased production of a neuron-associated molecule in culture or in vivo, e.g., choline acetyltransferase or acetylcholinesterase with respect to motor neurons; or (4) decreased symptoms of neuron dysfunction in vivo. Such effects may be measured by any method known in the art. In preferred, non-limiting embodiments, increased survival of neurons may routinely be measured using a method set forth herein or otherwise known in the art, such as, for example, in Zhang et al., Proc Natl Acad Sci USA 97:3637-42 (2000) or in Arakawa et al., J. Neurosci., 10:3507-15 (1990); increased sprouting of neurons may be detected by methods known in the art, such as, for example, the methods set forth in Pestronk et al., Exp. Neurol., 70:65-82 (1980), or Brown et al., Ann. Rev. Neurosci., 4:1742 (1981); increased production of neuron-associated molecules may be measured by bioassay, enzymatic assay, antibody binding, Northern blot assay, etc., using techniques known in the art and depending on the molecule to be measured; and motor neuron dysfunction may be measured by assessing the physical manifestation of motor neuron disorder, e.g., weakness, motor neuron conduction velocity, or functional disability.

[0637] In specific embodiments, motor neuron disorders that may be treated according to the invention include, but are not limited to, disorders such as infarction, infection, exposure to toxin, trauma, surgical damage, degenerative disease or malignancy that may affect motor neurons as well as other components of the nervous system, as well as disorders that selectively affect neurons such as amyotrophic lateral sclerosis, and including, but not limited to, progressive spinal muscular atrophy, progressive bulbar palsy, primary lateral sclerosis, infantile and juvenile muscular atrophy, progressive bulbar paralysis of childhood (Fazio-Londe syndrome), poliomyelitis and the post polio syndrome, and Hereditary Motorsensory Neuropathy (Charcot-Marie-Tooth Disease).

[0638] Further, polypeptides or polynucleotides of the invention may play a role in neuronal survival; synapse formation; conductance; neural differentiation, etc. Thus, compositions of the invention (including polynucleotides, polypeptides, and agonists or antagonists) may be used to diagnose and/or treat or prevent diseases or disorders associated with these roles, including, but not limited to, learning and/or cognition disorders. The compositions of the invention may also be useful in the treatment or prevention of neurodegenerative disease states and/or behavioural disorders. Such neurodegenerative disease states and/or behavioral disorders include, but are not limited to, Alzheimer's Disease, Parkinson's Disease, Huntington's Disease, Tourette Syndrome, schizophrenia, mania, dementia, paranoia, obsessive compulsive disorder, panic disorder, learning disabilities, ALS, psychoses, autism, and altered behaviors, including disorders in feeding, sleep patterns, balance, and perception. In addition, compositions of the invention may also play a role in the treatment, prevention and/or detection of developmental disorders associated with the developing embryo, or sexually-linked disorders.

[0639] Additionally, polypeptides, polynucleotides and/or agonists or antagonists of the invention, may be useful in protecting neural cells from diseases, damage, disorders, or injury, associated with cerebrovascular disorders including, but not limited to, carotid artery diseases (e.g., carotid artery thrombosis, carotid stenosis, or Moyamoya Disease), cerebral amyloid angiopathy, cerebral aneurysm, cerebral anoxia, cerebral arteriosclerosis, cerebral arteriovenous malformations, cerebral artery diseases, cerebral embolism and thrombosis (e.g., carotid artery thrombosis, sinus thrombosis, or Wallenberg's Syndrome), cerebral hemorrhage (e.g., epidural or subdural hematoma, or subarachnoid hemorrhage), cerebral infarction, cerebral ischemia (e.g., transient cerebral ischemia, Subclavian Steal Syndrome, or vertebrobasilar insufficiency), vascular dementia (e.g., multi-infarct), leukomalacia, periventricular, and vascular headache (e.g., cluster headache or migraines).

[0640] In accordance with yet a further aspect of the present invention, there is provided a process for utilizing polynucleotides or polypeptides, as well as agonists or antagonists of the present invention, for therapeutic purposes, for example, to stimulate neurological cell proliferation and/or differentiation. Therefore, polynucleotides, polypeptides, agonists and/or antagonists of the invention may be used to treat and/or detect neurologic diseases. Moreover, polynucleotides or polypeptides, or agonists or antagonists of the invention, can be used as a marker or detector of a particular nervous system disease or disorder.

[0641] Examples of neurologic diseases which can be treated or detected with polynucleotides, polypeptides, agonists, and/or antagonists of the present invention include brain diseases, such as metabolic brain diseases which includes phenylketonuria such as maternal phenylketonuria, pyruvate carboxylase deficiency, pyruvate dehydrogenase complex deficiency, Wernicke's Encephalopathy, brain edema, brain neoplasms such as cerebellar neoplasms which include infratentorial neoplasms, cerebral ventricle neoplasms such as choroid plexus neoplasms, hypothalamic neoplasms, supratentorial neoplasms, canavan disease, cerebellar diseases such as cerebellar ataxia which include spinocerebellar degeneration such as ataxia telangiectasia, cerebellar dyssynergia, Friederich's Ataxia, Machado-Joseph Disease, olivopontocerebellar atrophy, cerebellar neoplasms such as infratentorial neoplasms, diffuse cerebral sclerosis such as encephalitis periaxialis, globoid cell leukodystrophy, metachromatic leukodystrophy and subacute sclerosing panencephalitis.

[0642] Additional neurologic diseases which can be treated or detected with polynucleotides, polypeptides, agonists, and/or antagonists of the present invention include cerebrovascular disorders (such as carotid artery diseases which include carotid artery thrombosis, carotid stenosis and Moyamoya Disease), cerebral amyloid angiopathy, cerebral aneurysm, cerebral anoxia, cerebral arteriosclerosis, cerebral arteriovenous malformations, cerebral artery diseases, cerebral embolism and thrombosis such as carotid artery thrombosis, sinus thrombosis and Wallenberg's Syndrome, cerebral hemorrhage such as epidural hematoma, subdural hematoma and subarachnoid hemorrhage, cerebral infarction, cerebral ischemia such as transient cerebral ischemia, Subclavian Steal Syndrome and vertebrobasilar insufficiency, vascular dementia such as multi-infarct dementia, periventricular leukomalacia, vascular headache such as cluster headache and migraine.

[0643] Additional neurologic diseases which can be treated or detected with polynucleotides, polypeptides, agonists, and/or antagonists of the present invention include dementia such as AIDS Dementia Complex, presenile dementia such as Alzheimer's Disease and Creutzfeldt-Jakob Syndrome, senile dementia such as Alzheimer's Disease and progressive supranuclear palsy, vascular dementia such as multi-infarct dementia, encephalitis which include encephalitis periaxialis, viral encephalitis such as epidemic encephalitis, Japanese Encephalitis, St. Louis Encephalitis, tick-borne encephalitis and West Nile Fever, acute disseminated encephalomyelitis, meningoencephalitis such as uveomeningoencephalitic syndrome, Postencephalitic Parkinson Disease and subacute sclerosing panencephalitis, encephalomalacia such as periventricular leukomalacia, epilepsy such as generalized epilepsy which includes infantile spasms, absence epilepsy, myoclonic epilepsy which includes MERRF Syndrome, tonic-clonic epilepsy, partial epilepsy such as complex partial epilepsy, frontal lobe epilepsy and temporal lobe epilepsy, post-traumatic epilepsy, status epilepticus such as Epilepsia Partialis Continua, and Hallervorden-Spatz Syndrome.

[0644] Additional neurologic diseases which can be treated or detected with polynucleotides, polypeptides, agonists, and/or antagonists of the present invention include hydrocephalus such as Dandy-Walker Syndrome and normal pressure hydrocephalus, hypothalamic diseases such as hypothalamic neoplasms, cerebral malaria, narcolepsy which includes cataplexy, bulbar poliomyelitis, cerebri pseudotumor, Rett Syndrome, Reye's Syndrome, thalamic diseases, cerebral toxoplasmosis, intracranial tuberculoma and Zellweger Syndrome, central nervous system infections such as AIDS Dementia Complex, Brain Abscess, subdural empyema, encephalomyelitis such as Equine Encephalomyelitis, Venezuelan Equine Encephalomyelitis, Necrotizing Hemorrhagic Encephalomyelitis, Visna, and cerebral malaria.

[0645] Additional neurologic diseases which can be treated or detected with polynucleotides, polypeptides, agonists, and/or antagonists of the present invention include meningitis such as arachnoiditis, aseptic meningtitis such as viral meningtitis which includes lymphocytic choriomeningitis, Bacterial meningtitis which includes Haemophilus Meningtitis, Listeria Meningtitis, Meningococcal Meningtitis such as Waterhouse-Friderichsen Syndrome, Pneumococcal Meningtitis and meningeal tuberculosis, fungal meningitis such as Cryptococcal Meningtitis, subdural effusion, meningoencephalitis such as uvemeningoencephalitic syndrome, myelitis such as transverse myelitis, neurosyphilis such as tabes dorsalis, poliomyelitis which includes bulbar poliomyelitis and postpoliomyelitis syndrome, prion diseases (such as Creutzfeldt-Jakob Syndrome, Bovine Spongiform Encephalopathy, Gerstmann-Straussler Syndrome, Kuru, Scrapie), and cerebral toxoplasmosis.

[0646] Additional neurologic diseases which can be treated or detected with polynucleotides, polypeptides, agonists, and/or antagonists of the present invention include central nervous system neoplasms such as brain neoplasms that include cerebellar neoplasms such as infratentorial neoplasms, cerebral ventricle neoplasms such as choroid plexus neoplasms, hypothalamic neoplasms and supratentorial neoplasms, meningeal neoplasms, spinal cord neoplasms which include epidural neoplasms, demyelinating diseases such as Canavan Diseases, diffuse cerebral sceloris which includes adrenoleukodystrophy, encephalitis periaxialis, globoid cell leukodystrophy, diffuse cerebral sclerosis such as metachromatic leukodystrophy, allergic encephalomyelitis, necrotizing hemorrhagic encephalomyelitis, progressive multifocal leukoencephalopathy, multiple sclerosis, central pontine myelinolysis, transverse myelitis, neuromyelitis optica, Scrapie, Swayback, Chronic Fatigue Syndrome, Visna, High Pressure Nervous Syndrome, Meningism, spinal cord diseases such as amyotonia congenita, amyotrophic lateral sclerosis, spinal muscular atrophy such as Werdnig-Hoffmann Disease, spinal cord compression, spinal cord neoplasms such as epidural neoplasms, syringomyelia, Tabes Dorsalis, Stiff-Man Syndrome, mental retardation such as Angelman Syndrome, Cri-du-Chat Syndrome, De Lange's Syndrome, Down Syndrome, Gangliosidoses such as gangliosidoses G(M1), Sandhoff Disease, Tay-Sachs Disease, Hartnup Disease, homocystinuria, Laurence-Moon- Biedl Syndrome, Lesch-Nyhan Syndrome, Maple Syrup Urine Disease, mucolipidosis such as fucosidosis, neuronal ceroid-lipofuscinosis, oculocerebrorenal syndrome, phenylketonuria such as maternal phenylketonuria, Prader-Willi Syndrome, Rett Syndrome, Rubinstein-Taybi Syndrome, Tuberous Sclerosis, WAGR Syndrome, nervous system abnormalities such as holoprosencephaly, neural tube defects such as anencephaly which includes hydrangencephaly, Arnold-Chairi Deformity, encephalocele, meningocele, meningomyelocele, spinal dysraphism such as spina bifida cystica and spina bifida occulta.

[0647] Additional neurologic diseases which can be treated or detected with polynucleotides, polypeptides, agonists, and/or antagonists of the present invention include hereditary motor and sensory neuropathies which include Charcot-Marie Disease, Hereditary optic atrophy, Refsum's Disease, hereditary spastic paraplegia, Werdnig-Hoffmann Disease, Hereditary Sensory and Autonomic Neuropathies such as Congenital Analgesia and Familial Dysautonomia, Neurologic manifestations (such as agnosia that include Gerstmann's Syndrome, Amnesia such as retrograde amnesia, apraxia, neurogenic bladder, cataplexy, communicative disorders such as hearing disorders that includes deafness, partial hearing loss, loudness recruitment and tinnitus, language disorders such as aphasia which include agraphia, anomia, broca aphasia, and Wernicke Aphasia, Dyslexia such as Acquired Dyslexia, language development disorders, speech disorders such as aphasia which includes anomia, broca aphasia and Wernicke Aphasia, articulation disorders, communicative disorders such as speech disorders which include dysarthria, echolalia, mutism and stuttering, voice disorders such as aphonia and hoarseness, decerebrate state, delirium, fasciculation, hallucinations, meningism, movement disorders such as angelman syndrome, ataxia, athetosis, chorea, dystonia, hypokinesia, muscle hypotonia, myoclonus, tic, torticollis and tremor, muscle hypertonia such as muscle rigidity such as stiff-man syndrome, muscle spasticity, paralysis such as facial paralysis which includes Herpes Zoster Oticus, Gastroparesis, Hemiplegia, ophthalmoplegia such as diplopia, Duane's Syndrome, Homer's Syndrome, Chronic progressive external ophthalmoplegia such as Kearns Syndrome, Bulbar Paralysis, Tropical Spastic Paraparesis, Paraplegia such as Brown-Sequard Syndrome, quadriplegia, respiratory paralysis and vocal cord paralysis, paresis, phantom limb, taste disorders such as ageusia and dysgeusia, vision disorders such as amblyopia, blindness, color vision defects, diplopia, hemianopsia, scotoma and subnormal vision, sleep disorders such as hypersomnia which includes Kleine-Levin Syndrome, insomnia, and somnambulism, spasm such as trismus, unconsciousness such as coma, persistent vegetative state and syncope and vertigo, neuromuscular diseases such as amyotonia congenita, amyotrophic lateral sclerosis, Lambert-Eaton Myasthenic Syndrome, motor neuron disease, muscular atrophy such as spinal muscular atrophy, Charcot-Marie Disease and Werdnig-Hoffmann Disease, Postpoliomyelitis Syndrome, Muscular Dystrophy, Myasthenia Gravis, Myotonia Atrophica, Myotonia Confenita, Nemaline Myopathy, Familial Periodic Paralysis, Multiplex Paramyloclonus, Tropical Spastic Paraparesis and Stiff-Man Syndrome, peripheral nervous system diseases such as acrodynia, amyloid neuropathies, autonomic nervous system diseases such as Adie's Syndrome, Barre-Lieou Syndrome, Familial Dysautonomia, Homer's Syndrome, Reflex Sympathetic Dystrophy and Shy-Drager Syndrome, Cranial Nerve Diseases such as Acoustic Nerve Diseases such as Acoustic Neuroma which includes Neurofibromatosis 2, Facial Nerve Diseases such as Facial Neuralgia,Melkersson-Rosenthal Syndrome, ocular motility disorders which includes amblyopia, nystagmus, oculomotor nerve paralysis, ophthalmoplegia such as Duane's Syndrome, Homer's Syndrome, Chronic Progressive External Ophthalmoplegia which includes Kearns Syndrome, Strabismus such as Esotropia and Exotropia, Oculomotor Nerve Paralysis, Optic Nerve Diseases such as Optic Atrophy which includes Hereditary Optic Atrophy, Optic Disk Drusen, Optic Neuritis such as Neuromyelitis Optica, Papilledema, Trigeminal Neuralgia, Vocal Cord Paralysis, Demyelinating Diseases such as Neuromyelitis Optica and Swayback, and Diabetic neuropathies such as diabetic foot.

[0648] Additional neurologic diseases which can be treated or detected with polynucleotides, polypeptides, agonists, and/or antagonists of the present invention include nerve compression syndromes such as carpal tunnel syndrome, tarsal tunnel syndrome, thoracic outlet syndrome such as cervical rib syndrome, ulnar nerve compression syndrome, neuralgia such as causalgia, cervico-brachial neuralgia, facial neuralgia and trigeminal neuralgia, neuritis such as experimental allergic neuritis, optic neuritis, polyneuritis, polyradiculoneuritis and radiculities such as polyradiculitis, hereditary motor and sensory neuropathies such as Charcot-Marie Disease, Hereditary Optic Atrophy, Refsum's Disease, Hereditary Spastic Paraplegia and Werdnig-Hoffmann Disease, Hereditary Sensory and Autonomic Neuropathies which include Congenital Analgesia and Familial Dysautonomia, POEMS Syndrome, Sciatica, Gustatory Sweating and Tetany).

[0649] Gastrointestinal Disorders

[0650] Polynucleotides or polypeptides, or agonists or antagonists of the present invention, may be used to treat, prevent, diagnose, and/or prognose gastrointestinal disorders, including inflammatory diseases and/or conditions, infections, cancers (e.g., intestinal neoplasms (carcinoid tumor of the small intestine, non-Hodgkin's lymphoma of the small intestine, small bowl lymphoma)), and ulcers, such as peptic ulcers.

[0651] Gastrointestinal disorders include dysphagia, odynophagia, inflammation of the esophagus, peptic esophagitis, gastric reflux, submucosal fibrosis and stricturing, Mallory-Weiss lesions, leiomyomas, lipomas, epidermal cancers, adeoncarcinomas, gastric retention disorders, gastroenteritis, gastric atrophy, gastric/stomach cancers, polyps of the stomach, autoimmune disorders such as pernicious anemia, pyloric stenosis, gastritis (bacterial, viral, eosinophilic, stress-induced, chronic erosive, atrophic, plasma cell, and Menetrier's), and peritoneal diseases (e.g., chyloperioneum, hemoperitoneum, mesenteric cyst, mesenteric lymphadenitis, mesenteric vascular occlusion, panniculitis, neoplasms, peritonitis, pneumoperitoneum, bubphrenic abscess).

[0652] Gastrointestinal disorders also include disorders associated with the small intestine, such as malabsorption syndromes, distension, irritable bowel syndrome, sugar intolerance, celiac disease, duodenal ulcers, duodenitis, tropical sprue, Whipple's disease, intestinal lymphangiectasia, Crohn's disease, appendicitis, obstructions of the ileum, Meckel's diverticulum, multiple diverticula, failure of complete rotation of the small and large intestine, lymphoma, and bacterial and parasitic diseases (such as Traveler's diarrhea, typhoid and paratyphoid, cholera, infection by Roundworms (Ascariasis lumbricoides), Hookworms (Ancylostoma duodenale), Threadworms (Enterobius vennicularis), Tapeworms (Taenia saginata, Echinococcus granulosus, Diphyllobothrium spp., and T. solium).

[0653] Liver diseases and/or disorders include intrahepatic cholestasis (alagille syndrome, biliary liver cirrhosis), fatty liver (alcoholic fatty liver, reye syndrome), hepatic vein thrombosis, hepatolentricular degeneration, hepatomegaly, hepatopulmonary syndrome, hepatorenal syndrome, portal hypertension (esophageal and gastric varices), liver abscess (amebic liver abscess), liver cirrhosis (alcoholic, biliary and experimental), alcoholic liver diseases (fatty liver, hepatitis, cirrhosis), parasitic (hepatic echinococcosis, fascioliasis, amebic liver abscess), jaundice (hemolytic, hepatocellular, and cholestatic), cholestasis, portal hypertension, liver enlargement, ascites, hepatitis (alcoholic hepatitis, animal hepatitis, chronic hepatitis (autoimmune, hepatitis B, hepatitis C, hepatitis D, drug induced), toxic hepatitis, viral human hepatitis (hepatitis A, hepatitis B, hepatitis C, hepatitis D, hepatitis E), Wilson's disease, granulomatous hepatitis, secondary biliary cirrhosis, hepatic encephalopathy, portal hypertension, varices, hepatic encephalopathy, primary biliary cirrhosis, primary sclerosing cholangitis, hepatocellular adenoma, hemangiomas, bile stones, liver failure (hepatic encephalopathy, acute liver failure), and liver neoplasms (angiomyolipoma, calcified liver metastases, cystic liver metastases, epithelial tumors, fibrolamellar hepatocarcinoma, focal nodular hyperplasia, hepatic adenoma, hepatobiliary cystadenoma, hepatoblastoma, hepatocellular carcinoma, hepatoma, liver cancer, liver hemangioendothelioma, mesenchymal hamartoma, mesenchymal tumors of liver, nodular regenerative hyperplasia, benign liver tumors (Hepatic cysts [Simple cysts, Polycystic liver disease, Hepatobiliary cystadenoma, Choledochal cyst], Mesenchymal tumors [Mesenchymal hamartoma, Infantile hemangioendothelioma, Hemangioma, Peliosis hepatis, Lipomas, Inflammatory pseudotumor, Miscellaneous], Epithelial tumors [Bile duct epithelium (Bile duct hamartoma, Bile duct adenoma), Hepatocyte (Adenoma, Focal nodular hyperplasia, Nodular regenerative hyperplasia)], malignant liver tumors [hepatocellular, hepatoblastoma, hepatocellular carcinoma, cholangiocellular, cholangiocarcinoma, cystadenocarcinoma, tumors of blood vessels, angiosarcoma, Karposi's sarcoma, hemangioendothelioma, other tumors, embryonal sarcoma, fibrosarcoma, leiomyosarcoma, rhabdomyosarcoma, carcinosarcoma, teratoma, carcinoid, squamous carcinoma, primary lymphoma]), peliosis hepatis, erythrohepatic porphyria, hepatic porphyria (acute intermittent porphyria, porphyria cutanea tarda), Zellweger syndrome).

[0654] Pancreatic diseases and/or disorders include acute pancreatitis, chronic pancreatitis (acute necrotizing pancreatitis, alcoholic pancreatitis), neoplasms (adenocarcinoma of the pancreas, cystadenocarcinoma, insulinoma, gastrinoma, and glucagonoma, cystic neoplasms, islet-cell tumors, pancreoblastoma), and other pancreatic diseases (e.g., cystic fibrosis, cyst (pancreatic pseudocyst, pancreatic fistula, insufficiency)).

[0655] Gallbladder diseases include gallstones (cholelithiasis and choledocholithiasis), postcholecystectomy syndrome, diverticulosis of the gallbladder, acute cholecystitis, chronic cholecystitis, bile duct tumors, and mucocele.

[0656] Diseases and/or disorders of the large intestine include antibiotic-associated colitis, diverticulitis, ulcerative colitis, acquired megacolon, abscesses, fungal and bacterial infections, anorectal disorders (e.g., fissures, hemorrhoids), colonic diseases (colitis, colonic neoplasms [colon cancer, adenomatous colon polyps (e.g., villous adenoma), colon carcinoma, colorectal cancer], colonic diverticulitis, colonic diverticulosis, megacolon [Hirschsprung disease, toxic megacolon]; sigmoid diseases [proctocolitis, sigmoin neoplasms]), constipation, Crohn's disease, diarrhea (infantile diarrhea, dysentery), duodenal diseases (duodenal neoplasms, duodenal obstruction, duodenal ulcer, duodenitis), enteritis (enterocolitis), HIV enteropathy, ileal diseases (ileal neoplasms, ileitis), immunoproliferative small intestinal disease, inflammatory bowel disease (ulcerative colitis, Crohn's disease), intestinal atresia, parasitic diseases (anisakiasis, balantidiasis, blastocystis infections, cryptosporidiosis, dientamoebiasis, amebic dysentery, giardiasis), intestinal fistula (rectal fistula), intestinal neoplasms (cecal neoplasms, colonic neoplasms, duodenal neoplasms, ileal neoplasms, intestinal polyps, jejunal neoplasms, rectal neoplasms), intestinal obstruction (afferent loop syndrome, duodenal obstruction, impacted feces, intestinal pseudo-obstruction [cecal volvulus], intussusception), intestinal perforation, intestinal polyps (colonic polyps, gardner syndrome, peutz-jeghers syndrome), jejunal diseases (jejunal neoplasms), malabsorption syndromes (blind loop syndrome, celiac disease, lactose intolerance, short bowl syndrome, tropical sprue, whipple's disease), mesenteric vascular occlusion, pneumatosis cystoides intestinalis, protein-losing enteropathies (intestinal lymphagiectasis), rectal diseases (anus diseases, fecal incontinence, hemorrhoids, proctitis, rectal fistula, rectal prolapse, rectocele), peptic ulcer (duodenal ulcer, peptic esophagitis, hemorrhage, perforation, stomach ulcer, Zollinger-Ellison syndrome), postgastrectomy syndromes (dumping syndrome), stomach diseases (e.g., achlorhydria, duodenogastric reflux (bile reflux), gastric antral vascular ectasia, gastric fistula, gastric outlet obstruction, gastritis (atrophic or hypertrophic), gastroparesis, stomach dilatation, stomach diverticulum, stomach neoplasms (gastric cancer, gastric polyps, gastric adenocarcinoma, hyperplastic gastric polyp), stomach rupture, stomach ulcer, stomach volvulus), tuberculosis, visceroptosis, vomiting (e.g., hematemesis, hyperemesis gravidarum, postoperative nausea and vomiting) and hemorrhagic colitis.

[0657] Further diseases and/or disorders of the gastrointestinal system include biliary tract diseases, such as, gastroschisis, fistula (e.g., biliary fistula, esophageal fistula, gastric fistula, intestinal fistula, pancreatic fistula), neoplasms (e.g., biliary tract neoplasms, esophageal neoplasms, such as adenocarcinoma of the esophagus, esophageal squamous cell carcinoma, gastrointestinal neoplasms, pancreatic neoplasms, such as adenocarcinoma of the pancreas, mucinous cystic neoplasm of the pancreas, pancreatic cystic neoplasms, pancreatoblastoma, and peritoneal neoplasms), esophageal disease (e.g., bullous diseases, candidiasis, glycogenic acanthosis, ulceration, barrett esophagus varices, atresia, cyst, diverticulum (e.g., Zenker's diverticulum), fistula (e.g., tracheoesophageal fistula), motility disorders (e.g., CREST syndrome, deglutition disorders, achalasia, spasm, gastroesophageal reflux), neoplasms, perforation (e.g., Boerhaave syndrome, Mallory-Weiss syndrome), stenosis, esophagitis, diaphragmatic hernia (e.g., hiatal hernia); gastrointestinal diseases, such as, gastroenteritis (e.g., cholera morbus, norwalk virus infection), hemorrhage (e.g., hematemesis, melena, peptic ulcer hemorrhage), stomach neoplasms (gastric cancer, gastric polyps, gastric adenocarcinoma, stomach cancer)), hernia (e.g., congenital diaphragmatic hernia, femoral hernia, inguinal hernia, obturator hernia, umbilical hernia, ventral hernia), and intestinal diseases (e.g., cecal diseases (appendicitis, cecal neoplasms)).

[0658] Reproductive System Disorders

[0659] The polynucleotides or polypeptides, or agonists or antagonists of the invention may be used for the diagnosis, treatment, or prevention of diseases and/or disorders of the reproductive system. Reproductive system disorders that can be treated by the compositions of the invention, include, but are not limited to, reproductive system injuries, infections, neoplastic disorders, congenital defects, and diseases or disorders which result in infertility, complications with pregnancy, labor, or parturition, and postpartum difficulties.

[0660] Reproductive system disorders and/or diseases include diseases and/or disorders of the testes, including, but not limited to, testicular atrophy, testicular feminization, cryptorchism (unilateral and bilateral), anorchia, ectopic testis, epididymitis and orchitis (typically resulting from infections such as, for example, gonorrhea, mumps, tuberculosis, and syphilis), testicular torsion, vasitis nodosa, germ cell tumors (e.g., seminomas, embryonal cell carcinomas, teratocarcinomas, choriocarcinomas, yolk sac tumors, and teratomas), stromal tumors (e.g., Leydig cell tumors), hydrocele, hematocele, varicocele, spermatocele, inguinal hernia, and disorders of sperm production (e.g., immotile cilia syndrome, aspermia, asthenozoospermia, azoospermiia, oligospermia, and teratozoospermia).

[0661] Reproductive system disorders also include, but are not limited to, disorders of the prostate gland, such as acute non-bacterial prostatitis, chronic non-bacterial prostatitis, acute bacterial prostatitis, chronic bacterial prostatitis, prostatodystonia, prostatosis, granulomatous prostatitis, malacoplakia, benign prostatic hypertrophy or hyperplasia, and prostate neoplastic disorders, including adenocarcinomas, transitional cell carcinomas, ductal carcinomas, and squamous cell carcinomas.

[0662] Additionally, the compositions of the invention may be useful in the diagnosis, treatment, and/or prevention of disorders or diseases of the penis and urethra, including, but not limited to, inflammatory disorders, such as balanoposthitis, balanitis xerotica obliterans, phimosis, paraphimosis, syphilis, herpes simplex virus, gonorrhea, non-gonococcal urethritis, chlamydia, mycoplasma, trichomonas, HIV, AIDS, Reiter's syndrome, condyloma acuminatum, condyloma latum, and pearly penile papules; urethral abnormalities, such as hypospadias, epispadias, and phimosis; premalignant lesions, including Erythroplasia of Queyrat, Bowen's disease, Bowenoid paplosis, giant condyloma of Buscke-Lowenstein, and varrucous carcinoma; penile cancers, including squamous cell carcinomas, carcinoma in situ, verrucous carcinoma, and disseminated penile carcinoma; urethral neoplastic disorders, including penile urethral carcinoma, bulbomembranous urethral carcinoma, and prostatic urethral carcinoma; and erectile disorders, such as priapism, Peyronie's disease, erectile dysfunction, and impotence.

[0663] Moreover, diseases and/or disorders of the vas deferens include, but are not limited to, vasculititis and CBAVD (congenital bilateral absence of the vas deferens); additionally, the polynucleotides, polypeptides, and agonists or antagonists of the present invention may be used in the diagnosis, treatment, and/or prevention of diseases and/or disorders of the seminal vesicles, including but not limited to, hydatid disease, congenital chloride diarrhea, and polycystic kidney disease.

[0664] Other disorders and/or diseases of the male reproductive system that may be diagnosed, treated, and/or prevented with the compositions of the invention include, but are not limited to, Klinefelter's syndrome, Young's syndrome, premature ejaculation, diabetes mellitus, cystic fibrosis, Kartagener's syndrome, high fever, multiple sclerosis, and gynecomastia.

[0665] Further, the polynucleotides, polypeptides, and agonists or antagonists of the present invention may be used in the diagnosis, treatment, and/or prevention of diseases and/or disorders of the vagina and vulva, including, but not limited to, bacterial vaginosis, candida vaginitis, herpes simplex virus, chancroid, granuloma inguinale, lymphogranuloma venereum, scabies, human papillomavirus, vaginal trauma, vulvar trauma, adenosis, chlamydia vaginitis, gonorrhea, trichomonas vaginitis, condyloma acuminatum, syphilis, molluscum contagiosum, atrophic vaginitis, Paget's disease, lichen sclerosus, lichen planus, vulvodynia, toxic shock syndrome, vaginismus, vulvovaginitis, vulvar vestibulitis, and neoplastic disorders, such as squamous cell hyperplasia, clear cell carcinoma, basal cell carcinoma, melanomas, cancer of Bartholin's gland, and vulvar intraepithelial neoplasia.

[0666] Disorders and/or diseases of the uterus that may be diagnosed, treated, and/or prevented with the compositions of the invention include, but are not limited to, dysmenorrhea, retroverted uterus, endometriosis, fibroids, adenomyosis, anovulatory bleeding, amenorrhea, Cushing's syndrome, hydatidiform moles, Asherman's syndrome, premature menopause, precocious puberty, uterine polyps, dysfunctional uterine bleeding (e.g., due to aberrant hormonal signals), and neoplastic disorders, such as adenocarcinomas, keiomyosarcomas, and sarcomas. Additionally, the polypeptides, polynucleotides, or agonists or antagonists of the invention may be useful as a marker or detector of, as well as in the diagnosis, treatment, and/or prevention of congenital uterine abnormalities, such as bicornuate uterus, septate uterus, simple unicornuate uterus, unicornuate uterus with a noncavitary rudimentary horn, unicornuate uterus with a non-communicating cavitary rudimentary horn, unicornuate uterus with a communicating cavitary horn, arcuate uterus, uterine didelfus, and T-shaped uterus.

[0667] Ovarian diseases and/or disorders that may be diagnosed, treated, and/or prevented with the compositions of the invention include, but are not limited to, anovulation, polycystic ovary syndrome (Stein-Leventhal syndrome), ovarian cysts, ovarian hypofunction, ovarian insensitivity to gonadotropins, ovarian overproduction of androgens, right ovarian vein syndrome, amenorrhea, hirutism, and ovarian cancer (including, but not limited to, primary and secondary cancerous growth, Sertoli-Leydig tumors, endometriod carcinoma of the ovary, ovarian papillary serous adenocarcinoma, ovarian mucinous adenocarcinoma, and Ovarian Krukenberg tumors).

[0668] Cervical diseases and/or disorders that may be diagnosed, treated, and/or prevented with the compositions of the invention include, but are not limited to, cervicitis, chronic cervicitis, mucopurulent cervicitis, cervical dysplasia, cervical polyps, Nabothian cysts, cervical erosion, cervical incompetence, and cervical neoplasms (including, for example, cervical carcinoma, squamous metaplasia, squamous cell carcinoma, adenosquamous cell neoplasia, and columnar cell neoplasia).

[0669] Additionally, diseases and/or disorders of the reproductive system that may be diagnosed, treated, and/or prevented with the compositions of the invention include, but are not limited to, disorders and/or diseases of pregnancy, including miscarriage and stillbirth, such as early abortion, late abortion, spontaneous abortion, induced abortion, therapeutic abortion, threatened abortion, missed abortion, incomplete abortion, complete abortion, habitual abortion, missed abortion, and septic abortion; ectopic pregnancy, anemia, Rh incompatibility, vaginal bleeding during pregnancy, gestational diabetes, intrauterine growth retardation, polyhydramnios, HELLP syndrome, abruptio placentae, placenta previa, hyperemesis, preeclampsia, eclampsia, herpes gestationis, and urticaria of pregnancy. Additionally, the polynucleotides, polypeptides, and agonists or antagonists of the present invention may be used in the diagnosis, treatment, and/or prevention of diseases that can complicate pregnancy, including heart disease, heart failure, rheumatic heart disease, congenital heart disease, mitral valve prolapse, high blood pressure, anemia, kidney disease, infectious disease (e.g., rubella, cytomegalovirus, toxoplasmosis, infectious hepatitis, chlamydia, HIV, AIDS, and genital herpes), diabetes mellitus, Graves' disease, thyroiditis, hypothyroidism, Hashimoto's thyroiditis, chronic active hepatitis, cirrhosis of the liver, primary biliary cirrhosis, asthma, systemic lupus eryematosis, rheumatoid arthritis, myasthenia gravis, idiopathic thrombocytopenic purpura, appendicitis, ovarian cysts, gallbladder disorders,and obstruction of the intestine.

[0670] Complications associated with labor and parturition that may be diagnosed, treated, and/or prevented with the compositions of the invention include, but are not limited to, premature rupture of the membranes, pre-term labor, post-term pregnancy, postmaturity, labor that progresses too slowly, fetal distress (e.g., abnormal heart rate (fetal or maternal), breathing problems, and abnormal fetal position), shoulder dystocia, prolapsed umbilical cord, amniotic fluid embolism, and aberrant uterine bleeding.

[0671] Further, diseases and/or disorders of the postdelivery period, that may be diagnosed, treated, and/or prevented with the compositions of the invention, include, but are not limited to, endometritis, myometritis, parametritis, peritonitis, pelvic thrombophlebitis, pulmonary embolism, endotoxemia, pyelonephritis, saphenous thrombophlebitis, mastitis, cystitis, postpartum hemorrhage, and inverted uterus.

[0672] Other disorders and/or diseases of the female reproductive system that may be diagnosed, treated, and/or prevented by the polynucleotides, polypeptides, and agonists or antagonists of the present invention include, but are not limited to, Turner's syndrome, pseudohermaphroditism, premenstrual syndrome, pelvic inflammatory disease, pelvic congestion (vascular engorgement), frigidity, anorgasmia, dyspareunia, ruptured fallopian tube, and Mittelschmerz.

[0673] Developmental and Inherited Disorders

[0674] Polynuceotides or polypeptides, or agonists or antagonists of the present invention may be used to treat, prevent, diagnose, and/or prognose diseases associated with mixed fetal tissues, including, but not limited to, developmental and inherited disorders or defects of the nervous system, musculoskelelal system, execretory system, cardiovascular system, hematopoietic system, gastrointestinal system, reproductive system, and respiratory system. Compositions of the present invention may also be used to treat, prevent, diagnose, and/or prognose developmental and inherited disorders or defects associated with, but not limited to, skin, hair, visual, and auditory tissues, metabolism. Additionally, the compositions of the invention may be useful in the diagnosis, treatment, and/or prevention of disorders or diseases associated with, but not limited to, chromosomal or genetic abnormalities and hyperproliferation or neoplasia.

[0675] Disorders or defects of the nervous system associated with developmental or inherited abnormalities that may be diagnosed, treated, and/or prevented with the compostions of the invention include, but are not limited to, adrenoleukodystrophy, agen esis of corpus callosum, Alexander disease, anencephaly, Angelman syndrome, Arnold-Chiari deformity, Batten disease, Canavan disease, cephalic disorders, Charcot-Marie-Tooth disease, encephalocele, Friedreich's ataxia, Gaucher's disease, Gorlin syndrome, Hallervorden-Spatz disease, hereditary spastic paraplegia, Huntington disease, hydranencephaly, hydrocephalus, Joubert syndrome, Lesch-Nyhan syndrome, leukodystrophy, Menkes disease, microcephaly, Niemann-Pick Type C1, neurofibromatosis, porencephaly, progeria, proteus syndrome, Refsum disease, spina bifida, Sturge-Weber syndrome, Tay-Sachs disease, tuberous sclerosis, and von Hippel-Lindau disease.

[0676] Developmental and inherited disorders resulting in disorders or defects of the musculoskeletal system that may be diagnosed, treated, and/or prevented with the compositions of the invention include, but are not limited to, achondroplasia, atlanto-occipital fusion, arthrogryposis mulitplex congenita, autosomal recessive muscular dystrophy, Becker's muscular dystrophy, cerebral palsy, choanal atresia, cleft lip, cleft palate, clubfoot, congenital amputation, congenital dislocation of the hip, congenital torticollis, congenital scoliosis, dopa-repsonsive dystonia, Duchenne muscular dystrophy, early-onset generalized dystonia, femoral torsion, Gorlin syndrome, hypophosphatasia, Klippel-Feil syndrome, knee dislocation, myoclonic dystonia, myotonic dystrophy, nail-patella syndrome, osteogenesis imperfecta, paroxysmal dystonia, progeria, prune-belly syndrome, rapid-onset dystonia parkinsonism, scolosis, syndactyly, Treacher Collins' syndrome, velocardiofacial syndrome, and X-linked dystonia-parkinsonism.

[0677] Developmental or hereditary disorders or defects of the excretory system that may be diagnosed, treated, and/or prevented with the compositions of the invention include, but are not limited to, Alport's syndrome, Bartter's syndrome, bladder diverticula, bladder exstrophy, cystinuria, epispadias, Fanconi's syndrome, Hartnup disease, horseshoe kidney, hypospadias, kidney agenesis, kidney ectopia, kidney malrotation, Liddle's syndrome, medullary cystic disease, medullary sponge, multicystic kidney, kidney polycystic kidney disease, nail-patella syndrome, Potter's syndrome, urinary tract flow obstruction, vitamin D-resistant rickets, and Wilm's tumor.

[0678] Cardiovascular disorders or defects of developmental or hereditary origin that may be diagnosed, treated, and/or prevented with the compositions of the inventtion include, but are not limited to, aortic valve stenosis, atrial septal defects, artioventricular (A-V) canal defect, bicuspid aortic valve, coarctation or the aorta, dextrocardia, Ebstein's anomaly, Eisenmenger's complex, hypoplastic left heart syndrome, Marfan syndrome, patent ductus arteriosus, progeria, pulmonary atresia, pulmonary valve stenosis, subaortic stenosis, tetralogy of fallot, total anomalous pulmonary venous (P-V) connection, transposition of the great arteries, tricuspid atresia, truncus arteriosus, ventricular septal defects. Developmental or inherited disorders resulting in disorders involving the hematopoietic system that may be diagnosed, treated, and/or prevented with the compositions of the invention include, but not limited to, Bernard-Soulier syndrome, Chediak-Higashi syndrome, hemophilia, Hermansky-Pudlak syndrome, sickle cell anemia, storage pool disease, thromboxane A2 dysfunction, thrombasthenia, and von Willebrand's disease.

[0679] The compositions of the invention may also be used to diagnose, treat, and/or prevent developmental and inherited disorders resulting in disorders or defects of the gastrointestinal system, including, but not limited to, anal atresia, biliary atresia, esophageal atresia, diaphragmatic hernia, Hirschsprung's disease, Meckel's diverticulum, oligohydramnios, omphalocele, polyhydramnios, porphyria, situs inversus viscera. Developmental or inherited disorders resulting in metabolic disorders that may be diagnosed, treated, and/or prevented with the compositions of the invention include, but are not limited to, alpha-1 antitrypsin deficiency, cystic fibrosis, hemochromatosis, lysosomal storage disease, phenylketonuria, Wilson's disease, and Zellweger syndrome.

[0680] Disorders of the reproductive system that are developmentally or hereditary related that may also be diagnosed, treated, and/or prevented with the compositions of the invention include, but are not limited to, androgen insensitivity syndrome, ambiguous genitalia, autosomal sex reversal, congenital adreneal hyperplasia, gonadoblastoma, ovarian germ cell cancer, pseudohermphroditism, true hermaphroditism, undescended testis, XX male syndrome, and XY female type gonadal dysgenesis. The compositions of the invention may also be used to diagnose, treat, and/or prevent developmental or inherited respiratory defects including, but not limited to, askin tumor, azygos lobe, congenital diaphragmatic hernia, congenital lobar emphysema, cystic adenomatoid malformation, lobar emphysema, hyaline membrane disease, and pectus excavatum.

[0681] Developmental or inherited disorders may also result from chromosomal or genetic aberration that may be diagnosed, treated, and/or prevented with the compositions of the invention including, but not limited to, 4p- syndrome, cri du chat syndrome, Digeorge syndrome, Down's syndrome, Edward's syndrome, fragile X syndrome, Klinefelter's syndrome, Patau's syndrome, Prader-Willi syndrome, progeria, Turner's syndrome, triple X syndrome, and XYY syndrome. Other developmental disorders that can be diagnosed, treated, and/or prevented with the compositions of the invention, include, but are not limited to, fetal alcohol syndrome, and can be caused by environmental factors surrounding the developing fetus.

[0682] The compositions of the invention may further be able to be used to diagnose, treat, and/or prevent errors in development or a genetic disposition that may result in hyperproliferative disorders or neoplasms, including, but not limited to, acute childhood lymphoblastic leukemia, askin tumor, Beckwith-Wiedemann syndrome, childhood acute myeloid leukemia, childhood brain stem glioma, childhood cerebellar astrocytoma, childhood extracranial germ cell tumors childhood (primary), gonadoblastoma, hepatocellular cancer, childhood Hodgkin's disease, childhood Hodgkin's lymphoma, childhood hypothalamic and visual pathway glioma, childhood (primary) liver cancer, childhood lymphoblastic leukemia, childhood medulloblastoma, childhood non-Hodgkin's lymphoma, childhood pineal and supratentorial primitive neuroectodermal tumors, childhood primary liver cancer, childhood rhabdomyosarcoma, childhood soft tissue sarcoma, Gorlin syndrome, familial multiple endrocrine neoplasia type I, neuroblastoma, ovarian germ cell cancer, pheochromocytoma, retinoblastoma, and Wilm's tumor.

[0683] Polypeptides may be administered using any method known in the art, including, but not limited to, direct needle injection at the delivery site, intravenous injection, topical administration, catheter infusion, biolistic injectors, particle accelerators, gelfoam sponge depots, other commercially available depot materials, osmotic pumps, oral or suppositorial solid pharmaceutical formulations, decanting or topical applications during surgery, aerosol delivery. Such methods are known in the art. Polypeptides may be administered as part of a Therapeutic, described in more detail below. Methods of delivering polynucleotides are described in more detail herein.

[0684] Diseases at the Cellular Level

[0685] Diseases associated with increased cell survival or the inhibition of apoptosis that could be treated, prevented, diagnosed and/or prognosed using polynucleotides or polypeptides, as well as antagonists or agonists of the present invention, include cancers (such as follicular lymphomas, carcinomas with p53 mutations, and hormone-dependent tumors, including, but not limited to colon cancer, cardiac tumors, pancreatic cancer, melanoma, retinoblastoma, glioblastoma, lung cancer, intestinal cancer, testicular cancer, stomach cancer, neuroblastoma, myxoma, myoma, lymphoma, endothelioma, osteoblastoma, osteoclastoma, osteosarcoma, chondrosarcoma, adenoma, breast cancer, prostate cancer, Kaposi's sarcoma and ovarian cancer); autoimmune disorders (such as, multiple sclerosis, Sjogren's syndrome, Hashimoto's thyroiditis, biliary cirrhosis, Behcet's disease, Crohn's disease, polymyositis, systemic lupus erythematosus and immune-related glomerulonephritis and rheumatoid arthritis) and viral infections (such as herpes viruses, pox viruses and adenoviruses), inflammation, graft v. host disease, acute graft rejection, and chronic graft rejection.

[0686] In preferred embodiments, polynucleotides, polypeptides, and/or antagonists of the invention are used to inhibit growth, progression, and/or metastasis of cancers, in particular those [listed above] involving the related tissues as described in column 10 of Table 1.

[0687] Additional diseases or conditions associated with increased cell survival that could be treated or detected by polynucleotides or polypeptides, or agonists or antagonists of the present invention include, but are not limited to, progression, and/or metastases of malignancies and related disorders such as leukemia (including acute leukemias (e.g., acute lymphocytic leukemia, acute myelocytic leukemia (including myeloblastic, promyelocytic, myelomonocytic, monocytic, and erythroleukemia)) and chronic leukemias (e.g., chronic myelocytic (granulocytic) leukemia and chronic lymphocytic leukemia)), polycythemia vera, lymphomas (e.g., Hodgkin's disease and non-Hodgkin's disease), multiple myeloma, Waldenstrom's macroglobulinemia, heavy chain disease, and solid tumors including, but not limited to, sarcomas and carcinomas such as fibrosarcoma, myxosarcoma, liposarcoma, chondrosarcoma, osteogenic sarcoma, chordoma, angiosarcoma, endotheliosarcoma, lymphangiosarcoma, lymphangioendotheliosarcoma, synovioma, mesothelioma, Ewing's tumor, leiomyosarcoma, rhabdomyosarcoma, colon carcinoma, pancreatic cancer, breast cancer, ovarian cancer, prostate cancer, squamous cell carcinoma, basal cell carcinoma, adenocarcinoma, sweat gland carcinoma, sebaceous gland carcinoma, papillary carcinoma, papillary adenocarcinomas, cystadenocarcinoma, medullary carcinoma, bronchogenic carcinoma, renal cell carcinoma, hepatoma, bile duct carcinoma, choriocarcinoma, seminoma, embryonal carcinoma, Wilm's tumor, cervical cancer, testicular tumor, lung carcinoma, small cell lung carcinoma, bladder carcinoma, epithelial carcinoma, glioma, astrocytoma, medulloblastoma, craniopharyngioma, ependymoma, pinealoma, hemangioblastoma, acoustic neuroma, oligodendroglioma, menangioma, melanoma, neuroblastoma, and retinoblastoma.

[0688] Diseases associated with increased apoptosis that could be treated, prevented, diagnosted, and/or prognosed using polynucleotides or polypeptides, as well as agonists or antagonists of the present invention, include, but are not limited to, AIDS; neurodegenerative disorders (such as Alzheimer's disease, Parkinson's disease, Amyotrophic lateral sclerosis, Retinitis pigmentosa, Cerebellar degeneration and brain tumor or prior associated disease); autoimmune disorders (such as, multiple sclerosis, Sjogren's syndrome, Hashimoto's thyroiditis, biliary cirrhosis, Behcet's disease, Crohn's disease, polymyositis, systemic lupus erythematosus and immune-related glomerulonephritis and rheumatoid arthritis) myelodysplastic syndromes (such as aplastic anemia), graft v. host disease, ischemic injury (such as that caused by myocardial infarction, stroke and reperfusion injury), liver injury (e.g., hepatitis related liver injury, ischemia/reperfusion injury, cholestosis (bile duct injury) and liver cancer); toxin-induced liver disease (such as that caused by alcohol), septic shock, cachexia and anorexia.

[0689] Wound Healing and Epithelial Cell Proliferation

[0690] In accordance with yet a further aspect of the present invention, there is provided a process for utilizing polynucleotides or polypeptides, as well as agonists or antagonists of the present invention, for therapeutic purposes, for example, to stimulate epithelial cell proliferation and basal keratinocytes for the purpose of wound healing, and to stimulate hair follicle production and healing of dermal wounds. Polynucleotides or polypeptides, as well as agonists or antagonists of the present invention, may be clinically useful in stimulating wound healing including surgical wounds, excisional wounds, deep wounds involving damage of the dermis and epidermis, eye tissue wounds, dental tissue wounds, oral cavity wounds, diabetic ulcers, dermal ulcers, cubitus ulcers, arterial ulcers, venous stasis ulcers, bums resulting from heat exposure or chemicals, and other abnormal wound healing conditions such as uremia, malnutrition, vitamin deficiencies and complications associated with systemic treatment with steroids, radiation therapy and antineoplastic drugs and antimetabolites. Polynucleotides or polypeptides, as well as agonists or antagonists of the present invention, could be used to promote dermal reestablishment subsequent to dermal loss.

[0691] Polynucleotides or polypeptides, as well as agonists or antagonists of the present invention, could be used to increase the adherence of skin grafts to a wound bed and to stimulate re-epithelialization from the wound bed. The following are types of grafts that polynucleotides or polypeptides, agonists or antagonists of the present invention, could be used to increase adherence to a wound bed: autografts, artificial skin, allografts, autodermic graft, autoepdermic grafts, avacular grafts, Blair-Brown grafts, bone graft, brephoplastic grafts, cutis graft, delayed graft, dermic graft, epidermic graft, fascia graft, full thickness graft, heterologous graft, xenograft, homologous graft, hyperplastic graft, lamellar graft, mesh graft, mucosal graft, Ollier-Thiersch graft, omenpal graft, patch graft, pedicle graft, penetrating graft, split skin graft, thick split graft. Polynucleotides or polypeptides, as well as agonists or antagonists of the present invention, can be used to promote skin strength and to improve the appearance of aged skin.

[0692] It is believed that polynucleotides or polypeptides, as well as agonists or antagonists of the present invention, will also produce changes in hepatocyte proliferation, and epithelial cell proliferation in the lung, breast, pancreas, stomach, small intestine, and large intestine. Polynucleotides or polypeptides, as well as agonists or antagonists of the present invention, could promote proliferation of epithelial cells such as sebocytes, hair follicles, hepatocytes, type II pneumocytes, mucin-producing goblet cells, and other epithelial cells and their progenitors contained within the skin, lung, liver, and gastrointestinal tract. Polynucleotides or polypeptides, agonists or antagonists of the present invention, may promote proliferation of endothelial cells, keratinocytes, and basal keratinocytes.

[0693] Polynucleotides or polypeptides, as well as agonists or antagonists of the present invention, could also be used to reduce the side effects of gut toxicity that result from radiation, chemotherapy treatments or viral infections. Polynucleotides or polypeptides, as well as agonists or antagonists of the present invention, may have a cytoprotective effect on the small intestine mucosa. Polynucleotides or polypeptides, as well as agonists or antagonists of the present invention, may also stimulate healing of mucositis (mouth ulcers) that result from chemotherapy and viral infections.

[0694] Polynucleotides or polypeptides, as well as agonists or antagonists of the present invention, could further be used in full regeneration of skin in full and partial thickness skin defects, including bums, (i.e., repopulation of hair follicles, sweat glands, and sebaceous glands), treatment of other skin defects such as psoriasis. Polynucleotides or polypeptides, as well as agonists or antagonists of the present invention, could be used to treat epidermolysis bullosa, a defect in adherence of the epidermis to the underlying dermis which results in frequent, open and painful blisters by accelerating reepithelialization of these lesions. Polynucleotides or polypeptides, as well as agonists or antagonists of the present invention, could also be used to treat gastric and doudenal ulcers and help heal by scar formation of the mucosal lining and regeneration of glandular mucosa and duodenal mucosal lining more rapidly. Inflammatory bowel diseases, such as Crohn's disease and ulcerative colitis, are diseases, which result in destruction of the mucosal surface of the small or large intestine, respectively. Thus, polynucleotides or polypeptides, as well as agonists or antagonists of the present invention, could be used to promote the resurfacing of the mucosal surface to aid more rapid healing and to prevent progression of inflammatory bowel disease. Treatment with polynucleotides or polypeptides, agonists or antagonists of the present invention, is expected to have a significant effect on the production of mucus throughout the gastrointestinal tract and could be used to protect the intestinal mucosa from injurious substances that are ingested or following surgery. Polynucleotides or polypeptides, as well as agonists or antagonists of the present invention, could be used to treat diseases associate with the under expression.

[0695] Moreover, polynucleotides or polypeptides, as well as agonists or antagonists of the present invention, could be used to prevent and heal damage to the lungs due to various pathological states. Polynucleotides or polypeptides, as well as agonists or antagonists of the present invention, could stimulate proliferation and differentiation and promote the repair of alveoli and brochiolar epithelium to prevent or treat acute or chronic lung damage. For example, emphysema, which results in the progressive loss of aveoli, and inhalation injuries, i.e., resulting from smoke inhalation and bums, that cause necrosis of the bronchiolar epithelium and alveoli could be effectively treated using polynucleotides or polypeptides, agonists or antagonists of the present invention. Also, polynucleotides or polypeptides, as well as agonists or antagonists of the present invention, could be used to stimulate the proliferation of and differentiation of type II pneumocytes, which may help treat or prevent disease such as hyaline membrane diseases, such as infant respiratory distress syndrome and bronchopulmonary displasia, in premature infants.

[0696] Polynucleotides or polypeptides, as well as agonists or antagonists of the present invention, could stimulate the proliferation and differentiation of hepatocytes and, thus, could be used to alleviate or treat liver diseases and pathologies such as fulminant liver failure caused by cirrhosis, liver damage caused by viral hepatitis and toxic substances (i.e., acetaminophen, carbon tetraholoride and other hepatotoxins known in the art).

[0697] In addition, polynucleotides or polypeptides, as well as agonists or antagonists of the present invention, could be used treat or prevent the onset of diabetes mellitus. In patients with newly diagnosed Types I and II diabetes, where some islet cell function remains, polynucleotides or polypeptides, as well as agonists or antagonists of the present invention, could be used to maintain the islet function so as to alleviate, delay or prevent permanent manifestation of the disease. Also, polynucleotides or polypeptides, as well as agonists or antagonists of the present invention, could be used as an auxiliary in islet cell transplantation to improve or promote islet cell function.

[0698] Infectious Disease

[0699] Polynucleotides or polypeptides, as well as agonists or antagonists of the present invention can be used to treat or detect infectious agents. For example, by increasing the immune response, particularly increasing the proliferation and differentiation of B and/or T cells, infectious diseases may be treated. The immune response may be increased by either enhancing an existing immune response, or by initiating a new immune response. Alternatively, polynucleotides or polypeptides, as well as agonists or antagonists of the present invention may also directly inhibit the infectious agent, without necessarily eliciting an immune response.

[0700] Viruses are one example of an infectious agent that can cause disease or symptoms that can be treated or detected by a polynucleotide or polypeptide and/or agonist or antagonist of the present invention. Examples of viruses, include, but are not limited to Examples of viruses, include, but are not limited to the following DNA and RNA viruses and viral families: Arbovirus, Adenoviridae, Arenaviridae, Arterivirus, Birnaviridae, Bunyaviridae, Caliciviridae, Circoviridae, Coronaviridae, Dengue, EBV, HIV, Flaviviridae, Hepadnaviridae (Hepatitis), Herpesviridae (such as, Cytomegalovirus, Herpes Simplex, Herpes Zoster), Mononegavirus (e.g., Paramyxoviridae, Morbillivirus, Rhabdoviridae), Orthomyxoviridae (e.g., Influenza A, Influenza B, and parainfluenza), Papiloma virus, Papovaviridae, Parvoviridae, Picornaviridae, Poxviridae (such as Smallpox or Vaccinia), Reoviridae (e.g., Rotavirus), Retroviridae (HTLV-I, HTLV-II, Lentivirus), and Togaviridae (e.g., Rubivirus). Viruses falling within these families can cause a variety of diseases or symptoms, including, but not limited to: arthritis, bronchiollitis, respiratory syncytial virus, encephalitis, eye infections (e.g., conjunctivitis, keratitis), chronic fatigue syndrome, hepatitis (A, B, C, E, Chronic Active, Delta), Japanese B encephalitis, Junin, Chikungunya, Rift Valley fever, yellow fever, meningitis, opportunistic infections (e.g., AIDS), pneumonia, Burkitt's Lymphoma, chickenpox, hemorrhagic fever, Measles, Mumps, Parainfluenza, Rabies, the common cold, Polio, leukemia, Rubella, sexually transmitted diseases, skin diseases (e.g., Kaposi's, warts), and viremia. polynucleotides or polypeptides, or agonists or antagonists of the invention, can be used to treat or detect any of these symptoms or diseases. In specific embodiments, polynucleotides, polypeptides, or agonists or antagonists of the invention are used to treat: meningitis, Dengue, EBV, and/or hepatitis (e.g., hepatitis B). In an additional specific embodiment polynucleotides, polypeptides, or agonists or antagonists of the invention are used to treat patients nonresponsive to one or more other commercially available hepatitis vaccines. In a further specific embodiment polynucleotides, polypeptides, or agonists or antagonists of the invention are used to treat AIDS.

[0701] Similarly, bacterial or fungal agents that can cause disease or symptoms and that can be treated or detected by a polynucleotide or polypeptide and/or agonist or antagonist of the present invention include, but are not limited to, the following Gram-Negative and Gram-positive bacteria, bacterial families, and fungi: Actinomyces (e.g., Norcardia), Acinetobacter, Cryptococcus neoformans, Aspergillus, Bacillaceae (e.g., Bacillus anthrasis), Bacteroides (e.g., Bacteroides fragilis), Blastomycosis, Bordetella, Borrelia (e.g., Borrelia burgdorferi), Brucella, Candidia, Campylobacter, Chlamydia, Clostridium (e.g., Clostridium botulinum, Clostridium dificile, Clostridium perfringens, Clostridium tetani), Coccidioides, Corynebacterium (e.g., Corynebacterium diptheriae), Cryptococcus, Dermatocycoses, E. coli (e.g., Enterotoxigenic E. coli and Enterohemorrhagic E. coli), Enterobacter (e.g. Enterobacter aerogenes), Enterobacteriaceae (Klebsiella, Salmonella (e.g., Salmonella typhi, Salmonella enteritidis, Salmonella paratyphi), Serratia, Yersinia, Shigella), Erysipelothrix, Haemophilus (e.g., Haemophilus influenza type B), Helicobacter, Legionella (e.g., Legionella pneumophila), Leptospira, Listeria (e.g., Listeria monocytogenes), Mycoplasma, Mycobacterium (e.g., Mycobacterium leprae and Mycobacterium tuberculosis), Vibrio (e.g.,Vibrio cholerae), Neisseriaceae (e.g., Neisseria gonorrhea, Neisseria meningitidis), Pasteurellacea, Proteus, Pseudomonas (e.g., Psuedomonas aeruginosa), Rickettsiaceae, Spirochetes (e.g., Treponema spp., Leptospira spp., Borrelia spp.) Shigella spp., Staphylococcus (e.g., Staphylococcus aureus), Meningiococcus, Pneumococcus and Streptococcus (e.g., Streptococcus pneumoniae and Groups A,B, and C Streptococci), and Ureaplasmas. These bacterial, parasitic, and fungal families can cause diseases or symptoms, including, but not limited to: antibiotic-resistant infections, bacteremia, endocarditis, septicemia, eye infections (conjunctivitis) tuberculosis, uveitis, gingivitis, bacterial diarrhea, opportunistic infections (e.g., AIDS related infections), paronychia, prosthesis-related infections, dental caries, Reiter's Disease, respiratory tract infections (e.g., Whooping Cough or Empyema), sepsis, Lyme Disease, Cat-Scratch Disease, dysentery, paratyphoid fever, food poisoning, Legionella disease, chronic and acute inflammation, erythema, yeast infections, typhoid, pneumonia, gonorrhea, meningitis (e.g., meningitis types A and B), chlamydia, syphilis, diphtheria, leprosy, burcellosis, peptic ulcers, anthrax, spontaneous abortion, birth defects, lung infections, ear infections, deafness, blindness, lethargy, malaise, vomiting, chronic diarrhea, Crohn's disease, colitis, vaginosis, sterility, pelvic inflammatory disease, candidiasis, paratuberculosis, tuberculosis, lupus, botulism, gangrene, tetanus, impetigo, Rheumatic Fever, Scarlet Fever, sexually transmitted diseases, skin diseases (e.g., cellulitis, dermatocycoses), toxemia, urinary tract infections, wound infections or noscomial infections. Polynucleotides or polypeptides, agonists or antagonists of the invention, can be used to treat or detect any of these symptoms or diseases. In specific embodiments, polynucleotides, polypeptides, agonists or antagonists of the invention are used to treat: tetanus, diptheria, botulism, and/or meningitis type B.

[0702] Moreover, parasitic agents causing disease or symptoms that can be treated or detected by a polynucleotide or polypeptide and/or agonist or antagonist of the present invention include, but not limited to, the following families or class: Amebiasis, Babesiosis, Coccidiosis, Cryptosporidiosis, Dientamoebiasis, Dourine, Ectoparasitic, Giardiasis, Helminthiasis, Leishmaniasis, Theileriasis, Toxoplasmosis, Trypanosomiasis, and Trichomonas and Sporozoans (e.g., Plasmodium virax, Plasmodium falciparium, Plasmodium malariae and Plasmodium ovale). These parasites can cause a variety of diseases or symptoms, including, but not limited to: Scabies, Trombiculiasis, eye infections, intestinal disease (e.g., dysentery, giardiasis), liver disease, lung disease, opportunistic infections (e.g., AIDS related), malaria, pregnancy complications, and toxoplasmosis. polynucleotides or polypeptides, or agonists or antagonists of the invention, can be used to treat or detect any of these symptoms or diseases.

[0703] Polynucleotides or polypeptides, as well as agonists or antagonists of the present invention of the present invention could either be by administering an effective amount of a polypeptide to the patient, or by removing cells from the patient, supplying the cells with a polynucleotide of the present invention, and returning the engineered cells to the patient (ex vivo therapy). Moreover, the polypeptide or polynucleotide of the present invention can be used as an antigen in a vaccine to raise an immune response against infectious disease.

[0704] Regeneration

[0705] Polynucleotides or polypeptides, as well as agonists or antagonists of the present invention can be used to differentiate, proliferate, and attract cells, leading to the regeneration of tissues. (See, Science 276:59-87 (1997).) The regeneration of tissues could be used to repair, replace, or protect tissue damaged by congenital defects, trauma (wounds, bums, incisions, or ulcers), age, disease (e.g. osteoporosis, osteocarthritis, periodontal disease, liver failure), surgery, including cosmetic plastic surgery, fibrosis, reperfusion injury, or systemic cytokine damage.

[0706] Tissues that could be regenerated using the present invention include organs (e.g., pancreas, liver, intestine, kidney, skin, endothelium), muscle (smooth, skeletal or cardiac), vasculature (including vascular and lymphatics), nervous, hematopoietic, and skeletal (bone, cartilage, tendon, and ligament) tissue. Preferably, regeneration occurs without or decreased scarring. Regeneration also may include angiogenesis.

[0707] Moreover, polynucleotides or polypeptides, as well as agonists or antagonists of the present invention, may increase regeneration of tissues difficult to heal. For example, increased tendon/ligament regeneration would quicken recovery time after damage. Polynucleotides or polypeptides, as well as agonists or antagonists of the present invention could also be used prophylactically in an effort to avoid damage. Specific diseases that could be treated include of tendinitis, carpal tunnel syndrome, and other tendon or ligament defects. A further example of tissue regeneration of non-healing wounds includes pressure ulcers, ulcers associated with vascular insufficiency, surgical, and traumatic wounds.

[0708] Similarly, nerve and brain tissue could also be regenerated by using polynucleotides or polypeptides, as well as agonists or antagonists of the present invention, to proliferate and differentiate nerve cells. Diseases that could be treated using this method include central and peripheral nervous system diseases, neuropathies, or mechanical and traumatic disorders (e.g., spinal cord disorders, head trauma, cerebrovascular disease, and stoke). Specifically, diseases associated with peripheral nerve injuries, peripheral neuropathy (e.g., resulting from chemotherapy or other medical therapies), localized neuropathies, and central nervous system diseases (e.g., Alzheimer's disease, Parkinson's disease, Huntington's disease, amyotrophic lateral sclerosis, and Shy-Drager syndrome), could all be treated using the polynucleotides or polypeptides, as well as agonists or antagonists of the present invention.

[0709] Chemotaxis

[0710] Polynucleotides or polypeptides, as well as agonists or antagonists of the present invention may have chemotaxis activity. A chemotaxic molecule attracts or mobilizes cells (e.g., monocytes, fibroblasts, neutrophils, T-cells, mast cells, eosinophils, epithelial and/or endothelial cells) to a particular site in the body, such as inflammation, infection, or site of hyperproliferation. The mobilized cells can then fight off and/or heal the particular trauma or abnormality.

[0711] Polynucleotides or polypeptides, as well as agonists or antagonists of the present invention may increase chemotaxic activity of particular cells. These chemotactic molecules can then be used to treat inflammation, infection, hyperproliferative disorders, or any immune system disorder by increasing the number of cells targeted to a particular location in the body. For example, chemotaxic molecules can be used to treat wounds and other trauma to tissues by attracting immune cells to the injured location. Chemotactic molecules of the present invention can also attract fibroblasts, which can be used to treat wounds.

[0712] It is also contemplated that polynucleotides or polypeptides, as well as agonists or antagonists of the present invention may inhibit chemotactic activity. These molecules could also be used to treat disorders. Thus, polynucleotides or polypeptides, as well as agonists or antagonists of the present invention could be used as an inhibitor of chemotaxis.

[0713] Binding Activity

[0714] A polypeptide of the present invention may be used to screen for molecules that bind to the polypeptide or for molecules to which the polypeptide binds. The binding of the polypeptide and the molecule may activate (agonist), increase, inhibit (antagonist), or decrease activity of the polypeptide or the molecule bound. Examples of such molecules include antibodies, oligonucleotides, proteins (e.g., receptors),or small molecules.

[0715] Preferably, the molecule is closely related to the natural ligand of the polypeptide, e.g., a fragment of the ligand, or a natural substrate, a ligand, a structural or functional mimetic. (See, Coligan et al., Current Protocols in Immunology 1(2):Chapter 5 (1991).) Similarly, the molecule can be closely related to the natural receptor to which the polypeptide binds, or at least, a fragment of the receptor capable of being bound by the polypeptide (e.g., active site). In either case, the molecule can be rationally designed using known techniques.

[0716] Preferably, the screening for these molecules involves producing appropriate cells, which express the polypeptide. Preferred cells include cells from mammals, yeast, Drosophila, or E. coli. Cells expressing the polypeptide (or cell membrane containing the expressed polypeptide) are then preferably contacted with a test compound potentially containing the molecule to observe binding, stimulation, or inhibition of activity of either the polypeptide or the molecule.

[0717] The assay may simply test binding of a candidate compound to the polypeptide, wherein binding is detected by a label, or in an assay involving competition with a labeled competitor. Further, the assay may test whether the candidate compound results in a signal generated by binding to the polypeptide.

[0718] Alternatively, the assay can be carried out using cell-free preparations, polypeptide/molecule affixed to a solid support, chemical libraries, or natural product mixtures. The assay may also simply comprise the steps of mixing a candidate compound with a solution containing a polypeptide, measuring polypeptide/molecule activity or binding, and comparing the polypeptide/molecule activity or binding to a standard.

[0719] Preferably, an ELISA assay can measure polypeptide level or activity in a sample (e.g., biological sample) using a monoclonal or polyclonal antibody. The antibody can measure polypeptide level or activity by either binding, directly or indirectly, to the polypeptide or by competing with the polypeptide for a substrate.

[0720] Additionally, the receptor to which the polypeptide of the present invention binds can be identified by numerous methods known to those of skill in the art, for example, ligand panning and FACS sorting (Coligan, et al., Current Protocols in Immun., 1(2), Chapter 5, (1991)). For example, expression cloning is employed wherein polyadenylated RNA is prepared from a cell responsive to the polypeptides, for example, NIH3T3 cells which are known to contain multiple receptors for the FGF family proteins, and SC-3 cells, and a cDNA library created from this RNA is divided into pools and used to transfect COS cells or other cells that are not responsive to the polypeptides. Transfected cells which are grown on glass slides are exposed to the polypeptide of the present invention, after they have been labeled. The polypeptides can be labeled by a variety of means including iodination or inclusion of a recognition site for a site-specific protein kinase.

[0721] Following fixation and incubation, the slides are subjected to auto-radiographic analysis. Positive pools are identified and sub-pools are prepared and re-transfected using an iterative sub-pooling and re-screening process, eventually yielding a single clones that encodes the putative receptor.

[0722] As an alternative approach for receptor identification, the labeled polypeptides can be photoaffinity linked with cell membrane or extract preparations that express the receptor molecule. Cross-linked material is resolved by PAGE analysis and exposed to X-ray film. The labeled complex containing the receptors of the polypeptides can be excised, resolved into peptide fragments, and subjected to protein microsequencing. The amino acid sequence obtained from microsequencing would be used to design a set of degenerate oligonucleotide probes to screen a cDNA library to identify the genes encoding the putative receptors.

[0723] Moreover, the techniques of gene-shuffling, motif-shuffling, exon-shuffling, and/or codon-shuffling (collectively referred to as “DNA shuffling”) may be employed to modulate the activities of the polypeptide of the present invention thereby effectively generating agonists and antagonists of the polypeptide of the present invention. See generally, U.S. Pat. Nos. 5,605,793, 5,811,238, 5,830,721, 5,834,252, and 5,837,458, and Patten, P. A., et al., Curr. Opinion Biotechnol. 8:724-33 (1997); Harayama, S. Trends Biotechnol. 16(2):76-82 (1998); Hansson L. O., et al., J. Mol. Biol. 287:265-76 (1999); and Lorenzo, M. M. and Blasco, R. Biotechniques 24(2):308-13 (1998); each of these patents and publications are hereby incorporated by reference). In one embodiment, alteration of polynucleotides and corresponding polypeptides may be achieved by DNA shuffling. DNA shuffling involves the assembly of two or more DNA segments into a desired molecule by homologous, or site-specific, recombination. In another embodiment, polynucleotides and corresponding polypeptides may be altered by being subjected to random mutagenesis by error-prone PCR, random nucleotide insertion or other methods prior to recombination. In another embodiment, one or more components, motifs, sections, parts, domains, fragments, etc., of the polypeptide of the present invention may be recombined with one or more components, motifs, sections, parts, domains, fragments, etc. of one or more heterologous molecules. In preferred embodiments, the heterologous molecules are family members. In further preferred embodiments, the heterologous molecule is a growth factor such as, for example, platelet-derived growth factor (PDGF), insulin-like growth factor (IGF-1), transforming growth factor (TGF)-alpha, epidermal growth factor (EGF), fibroblast growth factor (FGF), TGF-beta, bone morphogenetic protein (BMP)-2, BMP-4, BMP-5, BMP-6, BMP-7, activins A and B, decapentaplegic(dpp), 60A, OP-2, dorsalin, growth differentiation factors (GDFs), nodal, MIS, inhibin-alpha, TGF-betal, TGF-beta2, TGF-beta3, TGF-beta5, and glial-derived neurotrophic factor (GDNF).

[0724] Other preferred fragments are biologically active fragments of the polypeptide of the present invention. Biologically active fragments are those exhibiting activity similar, but not necessarily identical, to an activity of the polypeptide of the present invention. The biological activity of the fragments may include an improved desired activity, or a decreased undesirable activity.

[0725] Additionally, this invention provides a method of screening compounds to identify those, which modulate the action of the polypeptide of the present invention. An example of such an assay comprises combining a mammalian fibroblast cell, the polypeptide of the present invention, the compound to be screened and ³[H] thymidine under cell culture conditions where the fibroblast cell would normally proliferate. A control assay may be performed in the absence of the compound to be screened and compared to the amount of fibroblast proliferation in the presence of the compound to determine if the compound stimulates proliferation by determining the uptake of ³[H] thymidine in each case. The amount of fibroblast cell proliferation is measured by liquid scintillation chromatography, which measures the incorporation of ³[H] thymidine. Both agonist and antagonist compounds may be identified by this procedure.

[0726] In another method, a mammalian cell or membrane preparation expressing a receptor for a polypeptide of the present invention is incubated with a labeled polypeptide of the present invention in the presence of the compound. The ability of the compound to enhance or block this interaction could then be measured. Alternatively, the response of a known second messenger system following interaction of a compound to be screened and the receptor is measured and the ability of the compound to bind to the receptor and elicit a second messenger response is measured to determine if the compound is a potential agonist or antagonist. Such second messenger systems include but are not limited to, cAMP guanylate cyclase, ion channels or phosphoinositide hydrolysis.

[0727] All of these above assays can be used as diagnostic or prognostic markers. The molecules discovered using these assays can be used to treat disease or to bring about a particular result in a patient (e.g., blood vessel growth) by activating or inhibiting the polypeptidelmolecule. Moreover, the assays can discover agents which may inhibit or enhance the production of the polypeptides of the invention from suitably manipulated cells or tissues.

[0728] Therefore, the invention includes a method of identifying compounds which bind to a polypeptide of the invention comprising the steps of: (a) incubating a candidate binding compound with a polypeptide of the present invention; and (b) determining if binding has occurred. Moreover, the invention includes a method of identifying agonists/antagonists comprising the steps of: (a) incubating a candidate compound with a polypeptide of the present invention, (b) assaying a biological activity, and (b) determining if a biological activity of the polypeptide has been altered.

[0729] Targeted Delivery

[0730] In another embodiment, the invention provides a method of delivering compositions to targeted cells expressing a receptor for a polypeptide of the invention, or cells expressing a cell bound form of a polypeptide of the invention.

[0731] As discussed herein, polypeptides or antibodies of the invention may be associated with heterologous polypeptides, heterologous nucleic acids, toxins, or prodrugs via hydrophobic, hydrophilic, ionic and/or covalent interactions. In one embodiment, the invention provides a method for the specific delivery of compositions of the invention to cells by administering polypeptides of the invention (including antibodies) that are associated with heterologous polypeptides or nucleic acids. In one example, the invention provides a method for delivering a therapeutic protein into the targeted cell. In another example, the invention provides a method for delivering a single stranded nucleic acid (e.g., antisense or ribozymes) or double stranded nucleic acid (e.g., DNA that can integrate into the cell's genome or replicate episomally and that can be transcribed) into the targeted cell.

[0732] In another embodiment, the invention provides a method for the specific destruction of cells (e.g., the destruction of tumor cells) by administering polypeptides of the invention (e.g., polypeptides of the invention or antibodies of the invention) in association with toxins or cytotoxic prodrugs.

[0733] By “toxin” is meant compounds that bind and activate endogenous cytotoxic effector systems, radioisotopes, holotoxins, modified toxins, catalytic subunits of toxins, or any molecules or enzymes not normally present in or on the surface of a cell that under defined conditions cause the cell's death. Toxins that may be used according to the methods of the invention include, but are not limited to, radioisotopes known in the art, compounds such as, for example, antibodies (or complement fixing containing portions thereof) that bind an inherent or induced endogenous cytotoxic effector system, thymidine kinase, endonuclease, RNAse, alpha toxin, ricin, abrin, Pseudomonas exotoxin A, diphtheria toxin, saporin, momordin, gelonin, pokeweed antiviral protein, alpha-sarcin and cholera toxin. By “cytotoxic prodrug” is meant a non-toxic compound that is converted by an enzyme, normally present in the cell, into a cytotoxic compound. Cytotoxic prodrugs that may be used according to the methods of the invention include, but are not limited to, glutamyl derivatives of benzoic acid mustard alkylating agent, phosphate derivatives of etoposide or mitomycin C, cytosine arabinoside, daunorubisin, and phenoxyacetamide derivatives of doxorubicin.

[0734] Drug Screening

[0735] Further contemplated is the use of the polypeptides of the present invention, or the polynucleotides encoding these polypeptides, to screen for molecules, which modify the activities of the polypeptides of the present invention. Such a method would include contacting the polypeptide of the present invention with a selected compound(s) suspected of having antagonist or agonist activity, and assaying the activity of these polypeptides following binding.

[0736] This invention is particularly useful for screening therapeutic compounds by using the polypeptides of the present invention, or binding fragments thereof, in any of a variety of drug screening techniques. The polypeptide or fragment employed in such a test may be affixed to a solid support, expressed on a cell surface, free in solution, or located intracellularly. One method of drug screening utilizes eukaryotic or prokaryotic host cells which are stably transformed with recombinant nucleic acids expressing the polypeptide or fragment. Drugs are screened against such transformed cells in competitive binding assays. One may measure, for example, the formulation of complexes between the agent being tested and a polypeptide of the present invention.

[0737] Thus, the present invention provides methods of screening for drugs or any other agents, which affect activities mediated by the polypeptides of the present invention. These methods comprise contacting such an agent with a polypeptide of the present invention or a fragment thereof and assaying for the presence of a complex between the agent and the polypeptide or a fragment thereof, by methods well known in the art. In such a competitive binding assay, the agents to screen are typically labeled. Following incubation, free agent is separated from that present in bound form, and the amount of free or uncomplexed label is a measure of the ability of a particular agent to bind to the polypeptides of the present invention.

[0738] Another technique for drug screening provides high throughput screening for compounds having suitable binding affinity to the polypeptides of the present invention, and is described in great detail in European Patent Application 84/03564, published on Sep. 13, 1984, which is incorporated herein by reference herein. Briefly stated, large numbers of different small peptide test compounds are synthesized on a solid substrate, such as plastic pins or some other surface. The peptide test compounds are reacted with polypeptides of the present invention and washed. Bound polypeptides are then detected by methods well known in the art. Purified polypeptides are coated directly onto plates for use in the aforementioned drug screening techniques. In addition, non-neutralizing antibodies may be used to capture the peptide and immobilize it on the solid support.

[0739] This invention also contemplates the use of competitive drug screening assays in which neutralizing antibodies capable of binding polypeptides of the present invention specifically compete with a test compound for binding to the polypeptides or fragments thereof. In this manner, the antibodies are used to detect the presence of any peptide which shares one or more antigenic epitopes with a polypeptide of the invention.

[0740] Antisense And Ribozyme (Antagonists)

[0741] In specific embodiments, antagonists according to the present invention are nucleic acids corresponding to the sequences contained in SEQ ID NO:X, or the complementary strand thereof, and/or to cDNA sequences contained in the related cDNA clone contained in a deposited library identified for example, in Table 1. In one embodiment, antisense sequence is generated internally, by the organism, in another embodiment, the antisense sequence is separately administered (see, for example, O'Connor, J., Neurochem. 56:560 (1991). Oligodeoxynucleotides as Antisense Inhibitors of Gene Expression, CRC Press, Boca Raton, Fla. (1988). Antisense technology can be used to control gene expression through antisense DNA or RNA, or through triple-helix formation. Antisense techniques are discussed for example, in Okano, J., Neurochem. 56:560 (1991); Oligodeoxynucleotides as Antisense Inhibitors of Gene Expression, CRC Press, Boca Raton, Fla. (1988). Triple helix formation is discussed in, for instance, Lee et al., Nucleic Acids Research 6:3073 (1979); Cooney et al., Science 241:456 (1988); and Dervan et al., Science 251:1300 (1991). The methods are based on binding of a polynucleotide to a complementary DNA or RNA.

[0742] For example, the use of c-myc and c-myb antisense RNA constructs to inhibit the growth of the non-lymphocytic leukemia cell line HL-60 and other cell lines was previously described. (Wickstrom et al. (1988); Anfossi et al. (1989)). These experiments were performed in vitro by incubating cells with the oligoribonucleotide. A similar procedure for in vivo use is described in WO 91/15580. Briefly, a pair of oligonucleotides for a given antisense RNA is produced as follows: A sequence complimentary to the first 15 bases of the open reading frame is flanked by an EcoR1 site on the 5′ end and a HindIII site on the 3′ end. Next, the pair of oligonucleotides is heated at 90° C. for one minute and then annealed in 2× ligation buffer (20 mM TRIS HCl pH 7.5, 10 mM MgCl2, 10MM dithiothreitol (DTT) and 0.2 mM ATP) and then ligated to the EcoR1/Hind III site of the retroviral vector PMV7 (WO 91/15580).

[0743] For example, the 5′ coding portion of a polynucleotide that encodes the polypeptide of the present invention may be used to design an antisense RNA oligonucleotide of from about 10 to 40 base pairs in length. A DNA oligonucleotide is designed to be complementary to a region of the gene involved in transcription thereby preventing transcription and the production of the receptor. The antisense RNA oligonucleotide hybridizes to the mRNA in vivo and blocks translation of the mRNA molecule into receptor polypeptide.

[0744] In one embodiment, the antisense nucleic acid of the invention is produced intracellularly by transcription from an exogenous sequence. For example, a vector or a portion thereof, is transcribed, producing an antisense nucleic acid (RNA) of the invention. Such a vector would contain a sequence encoding the antisense nucleic acid. Such a vector can remain episomal or become chromosomally integrated, as long as it can be transcribed to produce the desired antisense RNA. Such vectors can be constructed by recombinant DNA technology methods standard in the art. Vectors can be plasmid, viral, or others known in the art, used for replication and expression in vertebrate cells. Expression of the sequence encoding the polypeptide of the present invention or fragments thereof, can be by any promoter known in the art to act in vertebrate, preferably human cells. Such promoters can be inducible or constitutive. Such promoters include, but are not limited to, the SV40 early promoter region (Bernoist and Chambon, Nature 29:304-310 (1981), the promoter contained in the 3′ long terminal repeat of Rous sarcoma virus (Yamamoto et al., Cell 22:787-797 (1980), the herpes thymidine promoter (Wagner et al., Proc. Natl. Acad. Sci. U.S.A. 78:1441-1445 (1981), the regulatory sequences of the metallothionein gene (Brinster, et al., Nature 296:39-42 (1982)), etc.

[0745] The antisense nucleic acids of the invention comprise a sequence complementary to at least a portion of an RNA transcript of a gene of the present invention. However, absolute complementarity, although preferred, is not required. A sequence “complementary to at least a portion of an RNA,” referred to herein, means a sequence having sufficient complementarity to be able to hybridize with the RNA, forming a stable duplex; in the case of double stranded antisense nucleic acids, a single strand of the duplex DNA may thus be tested, or triplex formation may be assayed. The ability to hybridize will depend on both the degree of complementarity and the length of the antisense nucleic acid. Generally, the larger the hybridizing nucleic acid, the more base mismatches with a RNA it may contain and still form a stable duplex (or triplex as the case may be). One skilled in the art can ascertain a tolerable degree of mismatch by use of standard procedures to determine the melting point of the hybridized complex.

[0746] Oligonucleotides that are complementary to the 5′ end of the message, e.g., the 5′ untranslated sequence up to and including the AUG initiation codon, should work most efficiently at inhibiting translation. However, sequences complementary to the 3′ untranslated sequences of mRNAs have been shown to be effective at inhibiting translation of mRNAs as well. See generally, Wagner, R., 1994, Nature 372:333-335. Thus, oligonucleotides complementary to either the 5′- or 3′- non- translated, non-coding regions of polynucleotide sequences described herein could be used in an antisense approach to inhibit translation of endogenous mRNA. Oligonucleotides complementary to the 5′ untranslated region of the MRNA should include the complement of the AUG start codon. Antisense oligonucleotides complementary to mRNA coding regions are less efficient inhibitors of translation but could be used in accordance with the invention. Whether designed to hybridize to the 5′-, 3′- or coding region of mRNA of the present invention, antisense nucleic acids should be at least six nucleotides in length, and are preferably oligonucleotides ranging from 6 to about 50 nucleotides in length. In specific aspects the oligonucleotide is at least 10 nucleotides, at least 17 nucleotides, at least 25 nucleotides or at least 50 nucleotides.

[0747] The polynucleotides of the invention can be DNA or RNA or chimeric mixtures or derivatives or modified versions thereof, single-stranded or double-stranded. The oligonucleotide can be modified at the base moiety, sugar moiety, or phosphate backbone, for example, to improve stability of the molecule, hybridization, etc. The oligonucleotide may include other appended groups such as peptides (e.g., for targeting host cell receptors in vivo), or agents facilitating transport across the cell membrane (see, e.g., Letsinger et al., 1989, Proc. Natl. Acad. Sci. U.S.A. 86:6553-6556; Lemaitre et al., 1987, Proc. Natl. Acad. Sci. 84:648-652; PCT Publication No. WO88/09810, published Dec. 15, 1988) or the blood-brain barrier (see, e.g., PCT Publication No. WO89/10134, published Apr. 25, 1988), hybridization-triggered cleavage agents. (See, e.g., Krol et al., 1988, BioTechniques 6:958-976) or intercalating agents. (See, e.g., Zon, 1988, Pharm. Res. 5:539-549). To this end, the oligonucleotide may be conjugated to another molecule, e.g., a peptide, hybridization triggered cross-linking agent, transport agent, hybridization-triggered cleavage agent, etc.

[0748] The antisense oligonucleotide may comprise at least one modified base moiety which is selected from the group including, but not limited to, 5-fluorouracil, 5-bromouracil, 5-chlorouracil, 5-iodouracil, hypoxanthine, xantine, 4-acetylcytosine, 5-(carboxyhydroxylmethyl) uracil, 5-carboxymethylaminomethyl-2-thiouridine, 5-carboxymethylaminomethyluracil, dihydrouracil, beta-D-galactosylqueosine, inosine, N6-isopentenyladenine, 1-methylguanine, 1-methylinosine, 2,2-dimethylguanine, 2-methyladenine, 2-methylguanine, 3-methylcytosine, 5-methylcytosine, N6-adenine, 7-methylguanine, 5-methylaminomethyluracil, 5-methoxyaminomethyl-2-thiouracil, beta-D-mannosylqueosine, 5′-methoxycarboxymethyluracil, 5-methoxyuracil, 2-methylthio-N6-isopentenyladenine, uracil-5-oxyacetic acid (v), wybutoxosine, pseudouracil, queosine, 2-thiocytosine, 5-methyl-2-thiouracil, 2-thiouracil, 4-thiouracil, 5-methyluracil, uracil-5-oxyacetic acid methylester, uracil-5-oxyacetic acid (v), 5-methyl-2-thiouracil, 3-(3-amino-3-N-2-carboxypropyl) uracil, (acp3)w, and 2,6-diaminopurine.

[0749] The antisense oligonucleotide may also comprise at least one modified sugar moiety selected from the group including, but not limited to, arabinose, 2-fluoroarabinose, xylulose, and hexose.

[0750] In yet another embodiment, the antisense oligonucleotide comprises at least one modified phosphate backbone selected from the group including, but not limited to, a phosphorothioate, a phosphorodithioate, a phosphoramidothioate, a phosphoramidate, a phosphordiamidate, a methylphosphonate, an alkyl phosphotriester, and a formacetal or analog thereof.

[0751] In yet another embodiment, the antisense oligonucleotide is an a-anomeric oligonucleotide. An a-anomeric oligonucleotide forms specific double-stranded hybrids with complementary RNA in which, contrary to the usual b-units, the strands run parallel to each other (Gautier et al., 1987, Nucl. Acids Res. 15:6625-6641). The oligonucleotide is a 2′-0-methylribonucleotide (Inoue et al., 1987, Nucl. Acids Res. 15:6131-6148), or a chimeric RNA-DNA analogue (Inoue et al., 1987, FEBS Lett. 215:327-330).

[0752] Polynucleotides of the invention may be synthesized by standard methods known in the art, e.g. by use of an automated DNA synthesizer (such as are commercially available from Biosearch, Applied Biosystems, etc.). As examples, phosphorothioate oligonucleotides may be synthesized by the method of Stein et al. (1988, Nucl. Acids Res. 16:3209), methylphosphonate oligonucleotides can be prepared by use of controlled pore glass polymer supports (Sarin et al., 1988, Proc. Natl. Acad. Sci. U.S.A. 85:7448-7451), etc.

[0753] While antisense nucleotides complementary to the coding region sequence could be used, those complementary to the transcribed untranslated region are most preferred.

[0754] Potential antagonists according to the invention also include catalytic RNA, or a ribozyme (See, e.g., PCT International Publication WO 90/11364, published Oct. 4, 1990; Sarver et al, Science 247:1222-1225 (1990). While ribozymes that cleave mRNA at site specific recognition sequences can be used to destroy mRNAs, the use of hammerhead ribozymes is preferred. Hammerhead ribozymes cleave niRNAs at locations dictated by flanking regions that form complementary base pairs with the target MRNA. The sole requirement is that the target mRNA have the following sequence of two bases: 5′-UG-3′. The construction and production of hammerhead ribozymes is well known in the art and is described more fully in Haseloff and Gerlach, Nature 334:585-591 (1988). There are numerous potential hammerhead ribozyme cleavage sites within the nucleotide sequence of SEQ ID NO:X. Preferably, the ribozyme is engineered so that the cleavage recognition site is located near the 5′ end of the MRNA; i.e., to increase efficiency and minimize the intracellular accumulation of non-functional mRNA transcripts.

[0755] As in the antisense approach, the ribozymes of the invention can be composed of modified oligonucleotides (e.g. for improved stability, targeting, etc.) and should be delivered to cells which express in vivo. DNA constructs encoding the ribozyme may be introduced into the cell in the same manner as described above for the introduction of antisense encoding DNA. A preferred method of delivery involves using a DNA construct “encoding” the ribozyme under the control of a strong constitutive promoter, such as, for example, pol III or pol II promoter, so that transfected cells will produce sufficient quantities of the ribozyme to destroy endogenous messages and inhibit translation. Since ribozymes unlike antisense molecules, are catalytic, a lower intracellular concentration is required for efficiency.

[0756] Antagonist/agonist compounds may be employed to inhibit the cell growth and proliferation effects of the polypeptides of the present invention on neoplastic cells and tissues, i.e. stimulation of angiogenesis of tumors, and, therefore, retard or prevent abnormal cellular growth and proliferation, for example, in tumor formation or growth.

[0757] The antagonist/agonist may also be employed to prevent hyper-vascular diseases, and prevent the proliferation of epithelial lens cells after extracapsular cataract surgery. Prevention of the mitogenic activity of the polypeptides of the present invention may also be desirous in cases such as restenosis after balloon angioplasty.

[0758] The antagonist/agonist may also be employed to prevent the growth of scar tissue during wound healing.

[0759] The antagonist/agonist may also be employed to treat the diseases described herein.

[0760] Thus, the invention provides a method of treating disorders or diseases, including but not limited to the disorders or diseases listed throughout this application, associated with overexpression of a polynucleotide of the present invention by administering to a patient (a) an antisense molecule directed to the polynucleotide of the present invention, and/or (b) a ribozyme directed to the polynucleotide of the present invention.

[0761] Binding Peptides and Other Molecules

[0762] The invention also encompasses screening methods for identifying polypeptides and nonpolypeptides that bind cancer antigen polypeptides, and the cancer antigen binding molecules identified thereby. These binding molecules are useful, for example, as agonists and antagonists of the cancer antigen polypeptides. Such agonists and antagonists can be used, in accordance with the invention, in the therapeutic embodiments described in detail, below.

[0763] This method comprises the steps of:

[0764] contacting cancer antigen polypeptides or cancer antigen-like polypeptides with a plurality of molecules; and

[0765] identifying a molecule that binds the cancer antigen polypeptides or cancer antigen-like polypeptides.

[0766] The step of contacting the cancer antigen polypeptides or cancer antigen-like polypeptides with the plurality of molecules may be effected in a number of ways. For example, one may contemplate immobilizing the cancer antigen polypeptides or cancer antigen-like polypeptides on a solid support and bringing a solution of the plurality of molecules in contact with the immobilized cancer antigen polypeptides or cancer antigen-like polypeptides. Such a procedure would be akin to an affinity chromatographic process, with the affinity matrix being comprised of the immobilized cancer antigen polypeptides or cancer antigen-like polypeptides. The molecules having a selective affinity for the cancer antigen polypeptides or cancer antigen-like polypeptides can then be purified by affinity selection. The nature of the solid support, process for attachment of the cancer antigen polypeptides or cancer antigen-like polypeptides to the solid support, solvent, and conditions of the affinity isolation or selection are largely conventional and well known to those of ordinary skill in the art.

[0767] Alternatively, one may also separate a plurality of polypeptides into substantially separate fractions comprising a subset of or individual polypeptides. For instance, one can separate the plurality of polypeptides by gel electrophoresis, column chromatography, or like method known to those of ordinary skill for the separation of polypeptides. The individual polypeptides can also be produced by a transformed host cell in such a way as to be expressed on or about its outer surface (e.g., a recombinant phage). Individual isolates can then be “probed” by the cancer antigen polypeptides or cancer antigen-like polypeptides, optionally in the presence of an inducer should one be required for expression, to determine if any selective affinity interaction takes place between the cancer antigen polypeptides or cancer antigen-like polypeptides and the individual clone. Prior to contacting the cancer antigen polypeptides or cancer antigen-like polypeptides with each fraction comprising individual polypeptides, the polypeptides could first be transferred to a solid support for additional convenience. Such a solid support may simply be a piece of filter membrane, such as one made of nitrocellulose or nylon. In this manner, positive clones could be identified from a collection of transformed host cells of an expression library, which harbor a DNA construct encoding a polypeptide having a selective affinity for cancer antigen polypeptides or cancer antigen-like polypeptides. Furthermore, the amino acid sequence of the polypeptide having a selective affinity for the cancer antigen polypeptides or cancer antigen-like polypeptides can be determined directly by conventional means or the coding sequence of the DNA encoding the polypeptide can frequently be determined more conveniently. The primary sequence can then be deduced from the corresponding DNA sequence. If the amino acid sequence is to be determined from the polypeptide itself, one may use microsequencing techniques. The sequencing technique may include mass spectroscopy.

[0768] In certain situations, it may be desirable to wash away any unbound cancer antigen polypeptides or cancer antigen-like polypeptides, or alternatively, unbound polypeptides, from a mixture of the cancer antigen polypeptides or cancer antigen-like polypeptides and the plurality of polypeptides prior to attempting to determine or to detect the presence of a selective affinity interaction. Such a wash step may be particularly desirable when the cancer antigen polypeptides or cancer antigen-like polypeptides or the plurality of polypeptides is bound to a solid support.

[0769] The plurality of molecules provided according to this method may be provided by way of diversity libraries, such as random or combinatorial peptide or nonpeptide libraries which can be screened for molecules that specifically bind cancer antigen polypeptides. Many libraries are known in the art that can be used, e.g., chemically synthesized libraries, recombinant (e.g., phage display libraries), and in vitro translation-based libraries. Examples of chemically synthesized libraries are described in Fodor et al., 1991, Science 251:767-773; Houghten et al., 1991, Nature 354:84-86; Lam et al., 1991, Nature 354:82-84; Medynski, 1994, Bio/Technology 12:709-710;Gallop et al., 1994, J. Medicinal Chemistry 37(9):1233-1251; Ohlmeyer et al., 1993, Proc. Natl. Acad. Sci. USA 90:10922-10926; Erb et al., 1994, Proc. Natl. Acad. Sci. USA 91:11422-11426; Houghten et al., 1992, Biotechniques 13:412; Jayawickreme et al., 1994, Proc. Natl. Acad. Sci. USA 91:1614-1618; Salmon et al., 1993, Proc. Natl. Acad. Sci. USA 90:11708-11712; PCT Publication No. WO 93/20242; and Brenner and Lerner, 1992, Proc. Natl. Acad. Sci. USA 89:5381-5383.

[0770] Examples of phage display libraries are described in Scott and Smith, 1990, Science 249:386-390; Devlin et al., 1990, Science, 249:404-406; Christian, R. B., et al., 1992, J. Mol. Biol. 227:711-718); Lenstra, 1992, J. Immunol. Meth. 152:149-157; Kay et al., 1993, Gene 128:59-65; and PCT Publication No. WO 94/18318 dated Aug. 18, 1994.

[0771] In vitro translation-based libraries include but are not limited to those described in PCT Publication No. WO 91/05058 dated Apr. 18, 1991; and Mattheakis et al., 1994, Proc. Natl. Acad. Sci. USA 91:9022-9026.

[0772] By way of examples of nonpeptide libraries, a benzodiazepine library (see e.g., Bunin et al., 1994, Proc. Natl. Acad. Sci. USA 91:4708-4712) can be adapted for use. Peptoid libraries (Simon et al., 1992, Proc. Natl. Acad. Sci. USA 89:9367-9371) can also be used. Another example of a library that can be used, in which the amide functionalities in peptides have been permethylated to generate a chemically transformed combinatorial library, is described by Ostresh et al. (1994, Proc. Natl. Acad. Sci. USA 91:11138-11142).

[0773] The variety of non-peptide libraries that are useful in the present invention is great. For example, Ecker and Crooke, 1995, Bio/Technology 13:351-360 list benzodiazepines, hydantoins, piperazinediones, biphenyls, sugar analogs, beta-mercaptoketones, arylacetic acids, acylpiperidines, benzopyrans, cubanes, xanthines, aminimides, and oxazolones as among the chemical species that form the basis of various libraries.

[0774] Non-peptide libraries can be classified broadly into two types: decorated monomers and oligomers. Decorated monomer libraries employ a relatively simple scaffold structure upon which a variety functional groups is added. Often the scaffold will be a molecule with a known useful pharmacological activity. For example, the scaffold might be the benzodiazepine structure.

[0775] Non-peptide oligomer libraries utilize a large number of monomers that are assembled together in ways that create new shapes that depend on the order of the monomers. Among the monomer units that have been used are carbamates, pyrrolinones, and morpholinos. Peptoids, peptide-like oligomers in which the side chain is attached to the alpha amino group rather than the alpha carbon, form the basis of another version of non-peptide oligomer libraries. The first non-peptide oligomer libraries utilized a single type of monomer and thus contained a repeating backbone. Recent libraries have utilized more than one monomer, giving the libraries added flexibility.

[0776] Screening the libraries can be accomplished by any of a variety of commonly known methods. See, e.g., the following references, which disclose screening of peptide libraries: Parmley and Smith, 1989, Adv. Exp. Med. Biol. 251:215-218; Scott and Smith, 1990, Science 249:386-390; Fowlkes et al., 1992; BioTechniques 13:422-427; Oldenburg et al., 1992, Proc. Natl. Acad. Sci. USA 89:5393-5397; Yu et al., 1994, Cell 76:933-945; Staudt et al., 1988, Science 241:577-580; Bock et al., 1992, Nature 355:564-566; Tuerk et al., 1992, Proc. Natl. Acad. Sci. USA 89:6988-6992; Ellington et al., 1992, Nature 355:850-852; U.S. Pat. No. 5,096,815, U.S. Pat. No. 5,223,409, and U.S. Pat. No. 5,198,346, all to Ladner et al.; Rebar and Pabo, 1993, Science 263:671-673; and CT Publication No. WO 94/18318.

[0777] In a specific embodiment, screening to identify a molecule that binds cancer antigen polypeptides can be carried out by contacting the library members with a cancer antigen polypeptides or cancer antigen-like polypeptides immobilized on a solid phase and harvesting those library members that bind to the cancer antigen polypeptides or cancer antigen-like polypeptides. Examples of such screening methods, termed “panning” techniques are described by way of example in Parmley and Smith, 1988, Gene 73:305-318; Fowlkes et al., 1992, BioTechniques 13:422-427; International Publication No. WO 94/18318; and in references cited herein.

[0778] In another embodiment, the two-hybrid system for selecting interacting proteins in yeast (Fields and Song, 1989, Nature 340:245-246; Chien et al., 1991, Proc. Natl. Acad. Sci. USA 88:9578-9582) can be used to identify molecules that specifically bind to cancer antigen polypeptides or cancer antigen-like polypeptides.

[0779] Where the cancer antigen binding molecule is a polypeptide, the polypeptide can be conveniently selected from any peptide library, including random peptide libraries, combinatorial peptide libraries, or biased peptide libraries. The term “biased” is used herein to mean that the method of generating the library is manipulated so as to restrict one or more parameters that govern the diversity of the resulting collection of molecules, in this case peptides.

[0780] Thus, a truly random peptide library would generate a collection of peptides in which the probability of finding a particular amino acid at a given position of the peptide is the same for all 20 amino acids. A bias can be introduced into the library, however, by specifying, for example, that a lysine occurs every fifth amino acid or that positions 4, 8, and 9 of a decapeptide library be fixed to include only arginine. Clearly, many types of biases can be contemplated, and the present invention is not restricted to any particular bias. Furthermore, the present invention contemplates specific types of peptide libraries, such as phage displayed peptide libraries and those that utilize a DNA construct comprising a lambda phage vector with a DNA insert.

[0781] As mentioned above, in the case of a cancer antigen binding molecule that is a polypeptide, the polypeptide may have about 6 to less than about 60 amino acid residues, preferably about 6 to about 10 amino acid residues, and most preferably, about 6 to about 22 amino acids. In another embodiment, a cancer antigen binding polypeptide has in the range of 15-100 amino acids, or 20-50 amino acids.

[0782] The selected cancer antigen binding polypeptide can be obtained by chemical synthesis or recombinant expression.

[0783] Other Activities

[0784] A polypeptide, polynucleotide, agonist, or antagonist of the present invention, as a result of the ability to stimulate vascular endothelial cell growth, may be employed in treatment for stimulating re-vascularization of ischemic tissues due to various disease conditions such as thrombosis, arteriosclerosis, and other cardiovascular conditions. The polypeptide, polynucleotide, agonist, or antagonist of the present invention may also be employed to stimulate angiogenesis and limb regeneration, as discussed above.

[0785] A polypeptide, polynucleotide, agonist, or antagonist of the present invention may also be employed for treating wounds due to injuries, burns, post-operative tissue repair, and ulcers since they are mitogenic to various cells of different origins, such as fibroblast cells and skeletal muscle cells, and therefore, facilitate the repair or replacement of damaged or diseased tissue.

[0786] A polypeptide, polynucleotide, agonist, or antagonist of the present invention may also be employed to stimulate neuronal growth and to treat and prevent neuronal damage which occurs in certain neuronal disorders or neuro-degenerative conditions such as Alzheimer's disease, Parkinson's disease, and AIDS-related complex. A polypeptide, polynucleotide, agonist, or antagonist of the present invention may have the ability to stimulate chondrocyte growth; therefore, they may be employed to enhance bone and periodontal regeneration and aid in tissue transplants or bone grafts.

[0787] A polypeptide, polynucleotide, agonist, or antagonist of the present invention may be also employed to prevent skin aging due to sunburn by stimulating keratinocyte growth.

[0788] A polypeptide, polynucleotide, agonist, or antagonist of the present invention may also be employed for preventing hair loss, since FGF family members activate hair-forming cells and promotes melanocyte growth. Along the same lines, a polypeptide, polynucleotide, agonist, or antagonist of the present invention may be employed to stimulate growth and differentiation of hematopoietic cells and bone marrow cells when used in combination with other cytokines.

[0789] A polypeptide, polynucleotide, agonist, or antagonist of the present invention may also be employed to maintain organs before transplantation or for supporting cell culture of primary tissues. A polypeptide, polynucleotide, agonist, or antagonist of the present invention may also be employed for inducing tissue of mesodermal origin to differentiate in early embryos.

[0790] A polypeptide, polynucleotide, agonist, or antagonist of the present invention may also increase or decrease the differentiation or proliferation of embryonic stem cells, besides, as discussed above, hematopoietic lineage.

[0791] A polypeptide, polynucleotide, agonist, or antagonist of the present invention may also be used to modulate mammalian characteristics, such as body height, weight, hair color, eye color, skin, percentage of adipose tissue, pigmentation, size, and shape (e.g., cosmetic surgery). Similarly, a polypeptide, polynucleotide, agonist, or antagonist of the present invention may be used to modulate mammalian metabolism affecting catabolism, anabolism, processing, utilization, and storage of energy.

[0792] A polypeptide, polynucleotide, agonist, or antagonist of the present invention may be used to change a mammal's mental state or physical state by influencing biorhythms, caricadic rhythms, depression (including depressive disorders), tendency for violence, tolerance for pain, reproductive capabilities (preferably by Activin or Inhibin-like activity), hormonal or endocrine levels, appetite, libido, memory, stress, or other cognitive qualities.

[0793] A polypeptide, polynucleotide, agonist, or antagonist of the present invention may also be used as a food additive or preservative, such as to increase or decrease storage capabilities, fat content, lipid, protein, carbohydrate, vitamins, minerals, cofactors or other nutritional components.

[0794] The above-recited applications have uses in a wide variety of hosts. Such hosts include, but are not limited to, human, murine, rabbit, goat, guinea pig, camel, horse, mouse, rat, hamster, pig, micro-pig, chicken, goat, cow, sheep, dog, cat, non-human primate, and human. In specific embodiments, the host is a mouse, rabbit, goat, guinea pig, chicken, rat, hamster, pig, sheep, dog or cat. In preferred embodiments, the host is a mammal. In most preferred embodiments, the host is a human.

[0795] Other Preferred Embodiments

[0796] Other preferred embodiments of the claimed invention include an isolated nucleic acid molecule comprising a nucleotide sequence which is at least 95% identical to a sequence of at least about 50 contiguous nucleotides in the nucleotide sequence of SEQ ID NO:X or the complementary strand thereto, and/or the cDNA in the related cDNA clone contained in the deposit.

[0797] Also preferred is a nucleic acid molecule wherein said sequence of contiguous nucleotides is included in the nucleotide sequence of SEQ ID NO:X in the range of positions identified as “Start” and “End” in columns 7 and 8 as defined for SEQ ID NO:X in Table 1.

[0798] Also preferred is an isolated nucleic acid molecule comprising a nucleotide sequence which is at least 95% identical to a sequence of at least about 150 contiguous nucleotides in the nucleotide sequence of SEQ ID NO:X or the complementary strand thereto, and/or the cDNA in the related cDNA clone contained in the deposit.

[0799] Further preferred is an isolated nucleic acid molecule comprising a nucleotide sequence which is at least 95% identical to a sequence of at least about 500 contiguous nucleotides in the nucleotide sequence of SEQ ID NO:X or the complementary strand thereto, and/or the cDNA in the related cDNA clone contained in the deposit.

[0800] A further preferred embodiment is a nucleic acid molecule comprising a nucleotide sequence which is at least 95% identical to the nucleotide sequence of SEQ ID NO:X in the range of positions identified as “Start” and “End” in columns 7 and 8 as defined for SEQ ID NO:X in Table 1.

[0801] A further preferred embodiment is an isolated nucleic acid molecule comprising a nucleotide sequence which is at least 95% identical to the complete nucleotide sequence of SEQ ID NO:X or the complementary strand thereto, and/or the cDNA in the related cDNA clone contained in the deposit.

[0802] Also preferred is an isolated nucleic acid molecule which hybridizes under stringent hybridization conditions to a nucleic acid molecule comprising a nucleotide sequence of SEQ ID NO:X or the complementary strand thereto, and/or the cDNA in the related cDNA clone contained in the deposit, wherein said nucleic acid molecule which hybridizes does not hybridize under stringent hybridization conditions to a nucleic acid molecule having a nucleotide sequence consisting of only A residues or of only T residues.

[0803] Also preferred is a composition of matter comprising a DNA molecule which comprises a cDNA clone contained in the deposit.

[0804] Also preferred is an isolated nucleic acid molecule comprising a nucleotide sequence which is at least 95% identical to a sequence of at least 50 contiguous nucleotides in the nucleotide sequence of the cDNA in the related cDNA clone contained in the deposit.

[0805] Also preferred is an isolated nucleic acid molecule, wherein said sequence of at least 50 contiguous nucleotides is included in the nucleotide sequence of an open reading frame sequence encoded by the cDNA in the related cDNA clone contained in the deposit.

[0806] Also preferred is an isolated nucleic acid molecule comprising a nucleotide sequence which is at least 95% identical to sequence of at least 150 contiguous nucleotides in the nucleotide sequence encoded by the cDNA in the related cDNA clone contained in the deposit.

[0807] A further preferred embodiment is an isolated nucleic acid molecule comprising a nucleotide sequence which is at least 95% identical to sequence of at least 500 contiguous nucleotides in the nucleotide sequence encoded by the cDNA in the related cDNA clone contained in the deposit.

[0808] A further preferred embodiment is an isolated nucleic acid molecule comprising a nucleotide sequence which is at least 95% identical to the complete nucleotide sequence encoded by the cDNA in the related cDNA clone contained in the deposit.

[0809] A further preferred embodiment is a method for detecting in a biological sample a nucleic acid molecule comprising a nucleotide sequence which is at least 95% identical to a sequence of at least 50 contiguous nucleotides in a sequence selected from the group consisting of: a nucleotide sequence of SEQ ID NO:X or the complementary strand thereto; and a nucleotide sequence encoded by the cDNA in the related cDNA clone contained in the deposit; which method comprises a step of comparing a nucleotide sequence of at least one nucleic acid molecule in said sample with a sequence selected from said group and determining whether the sequence of said nucleic acid molecule in said sample is at least 95% identical to said selected sequence.

[0810] Also preferred is the above method wherein said step of comparing sequences comprises determining the extent of nucleic acid hybridization between nucleic acid molecules in said sample and a nucleic acid molecule comprising said sequence selected from said group. Similarly, also preferred is the above method wherein said step of comparing sequences is performed by comparing the nucleotide sequence determined from a nucleic acid molecule in said sample with said sequence selected from said group. The nucleic acid molecules can comprise DNA molecules or RNA molecules.

[0811] A further preferred embodiment is a method for identifying the species, tissue or cell type of a biological sample which method comprises a step of detecting nucleic acid molecules in said sample, if any, comprising a nucleotide sequence that is at least 95% identical to a sequence of at least 50 contiguous nucleotides in a sequence selected from the group consisting of: a nucleotide sequence of SEQ ID NO:X or the complementary strand thereto; and a nucleotide sequence encoded by the cDNA in the related cDNA clone contained in the deposit.

[0812] Also preferred is the above method for identifying the species, tissue or cell type of a biological sample which comprises a step of detecting nucleic acid molecules Icomprising a nucleotide sequence in a panel of at least two nucleotide sequences, wherein at least one sequence in said panel is at least 95% identical to a sequence of at least 50 contiguous nucleotides in a sequence selected from said group.

[0813] Also preferred is a method for diagnosing in a subject a pathological condition associated with abnormal structure or expression of a nucleotide sequence of SEQ ID NO:X; or the cDNA in the related cDNA clone identified in Table 1 which encodes a protein, wherein the method comprises a step of detecting in a biological sample obtained from said subject nucleic acid molecules, if any, comprising a nucleotide sequence that is at least 95% identical to a sequence of at least 50 contiguous nucleotides in a sequence selected from the group consisting of: a nucleotide sequence of SEQ ID NO:X or the complementary strand thereto; and a nucleotide sequence of the cDNA in the related cDNA clone contained in the deposit.

[0814] Also preferred is the above method for diagnosing a pathological condition which comprises a step of detecting nucleic acid molecules comprising a nucleotide sequence in a panel of at least two nucleotide sequences, wherein at least one sequence in said panel is at least 95% identical to a sequence of at least 50 contiguous nucleotides in a sequence selected from said group.

[0815] Also preferred is a composition of matter comprising isolated nucleic acid molecules wherein the nucleotide sequences of said nucleic acid molecules comprise a panel of at least two nucleotide sequences, wherein at least one sequence in said panel is at least 95% identical to a sequence of at least 50 contiguous nucleotides in a sequence selected from the group consisting of: a nucleotide sequence of SEQ ID NO:X or the complementary strand thereto; and a nucleotide sequence encoded by the cDNA in the related cDNA clone contained in the deposit. The nucleic acid molecules can comprise DNA molecules or RNA molecules.

[0816] Also preferred is a composition of matter comprising isolated nucleic acid molecules wherein the nucleotide sequences of said nucleic acid molecules comprise a DNA microarray or “chip” of at least 1, 2, 3, 4, 5, 6, 7, 8, 9, 10, 15, 20, 25, 30, 40, 50, 100, 150, 200, 250, 300, 500, 1000, 2000, 3000 or 4000 nucleotide sequences, wherein at least one sequence in said DNA microarray or “chip” is at least 95% identical to a sequence of at least 50 contiguous nucleotides in a sequence selected from the group consisting of: a nucleotide sequence of SEQ ID NO:X or the complementary strand thereto; and a nucleotide sequence encoded by the cDNA in the cDNA clone referenced in Table 1. The nucleic acid molecules can comprise DNA molecules or RNA molecules.

[0817] Also preferred is an isolated polypeptide comprising an amino acid sequence at least 90% identical to a sequence of at least about 10 contiguous amino acids in the polypeptide sequence of SEQ ID NO:Y; a polypeptide encoded by SEQ ID NO:X; and/or a polypeptide encoded by the cDNA in the related cDNA clone contained in the deposit.

[0818] Also preferred is an isolated polypeptide comprising an amino acid sequence at least 95% identical to a sequence of at least about 30 contiguous amino acids in the amino acid sequence of SEQ ID NO:Y; a polypeptide encoded by SEQ ID NO:X; and/or a polypeptide encoded by the cDNA in the related cDNA clone contained in the deposit.

[0819] Further preferred is an isolated polypeptide comprising an amino acid sequence at least 95% identical to a sequence of at least about 100 contiguous amino acids in the amino acid sequence of SEQ ID NO:Y; a polypeptide encoded by SEQ ID NO:X; and/or a polypeptide encoded by the cDNA in the related cDNA clone contained in the deposit.

[0820] Further preferred is an isolated polypeptide comprising an amino acid sequence at least 95% identical to the complete amino acid sequence of SEQ ID NO:Y; a polypeptide encoded by SEQ ID NO:X; and/or a polypeptide encoded by the cDNA in the related cDNA clone contained in the deposit.

[0821] Further preferred is an isolated polypeptide comprising an amino acid sequence at least 90% identical to a sequence of at least about 10 contiguous amino acids in the complete amino acid sequence of a polypeptide encoded by the cDNA clone referenced in Table 1.

[0822] Also preferred is a polypeptide wherein said sequence of contiguous amino acids is included in the amino acid sequence of a portion of said polypeptide encoded by the cDNA clone referenced in Table 1; a polypeptide encoded by SEQ ID NO:X; and/or the polypeptide sequence of SEQ ID NO:Y.

[0823] Also preferred is an isolated polypeptide comprising an amino acid sequence at least 95% identical to a sequence of at least about 30 contiguous amino acids in the amino acid sequence of a polypeptide encoded by the cDNA clone referenced in Table 1.

[0824] Also preferred is an isolated polypeptide comprising an amino acid sequence at least 95% identical to a sequence of at least about 100 contiguous amino acids in the amino acid sequence of a polypeptide encoded by the cDNA clone referenced in Table 1.

[0825] Also preferred is an isolated polypeptide comprising an amino acid sequence at least 95% identical to the amino acid sequence of a polypeptide encoded by the cDNA clone referenced in Table 1.

[0826] Further preferred is an isolated antibody which binds specifically to a polypeptide comprising an amino acid sequence that is at least 90% identical to a sequence of at least 10 contiguous amino acids in a sequence selected from the group consisting of: a polypeptide sequence of SEQ ID NO:Y; a polypeptide encoded by SEQ ID NO:X; and a polypeptide encoded by the cDNA in the related cDNA clone contained in the deposit.

[0827] Further preferred is a method for detecting in a biological sample a polypeptide comprising an amino acid sequence which is at least 90% identical to a sequence of at least 10 contiguous amino acids in a sequence selected from the group consisting of: a polypeptide sequence of SEQ ID NO:Y; a polypeptide encoded by SEQ ID NO:X; and a polypeptide encoded by the cDNA in the related cDNA clone referenced in Table 1; which method comprises a step of comparing an amino acid sequence of at least one polypeptide molecule in said sample with a sequence selected from said group and determining whether the sequence of said polypeptide molecule in said sample is at least 90% identical to said sequence of at least 10 contiguous amino acids.

[0828] Also preferred is the above method wherein said step of comparing an amino acid sequence of at least one polypeptide molecule in said sample with a sequence selected from said group comprises determining the extent of specific binding of polypeptides in said sample to an antibody which binds specifically to a polypeptide comprising an amino acid sequence that is at least 90% identical to a sequence of at least 10 contiguous amino acids in a sequence selected from the group consisting of: a polypeptide sequence of SEQ ID NO:Y; a polypeptide encoded by SEQ ID NO:X; and a polypeptide encoded by the cDNA in the related cDNA clone referenced in Table 1.

[0829] Also preferred is the above method wherein said step of comparing sequences is performed by comparing the amino acid sequence determined from a polypeptide molecule in said sample with said sequence selected from said group.

[0830] Also preferred is a method for identifying the species, tissue or cell type of a biological sample which method comprises a step of detecting polypeptide molecules in said sample, if any, comprising an amino acid sequence that is at least 90% identical to a sequence of at least 10 contiguous amino acids in a sequence selected from the group consisting of: polypeptide sequence of SEQ ID NO:Y; a polypeptide encoded by SEQ ID NO:X; and a polypeptide encoded by the cDNA in the related cDNA clone referenced in Table 1.

[0831] Also preferred is the above method for identifying the species, tissue or cell type of a biological sample, which method comprises a step of detecting polypeptide molecules comprising an amino acid sequence in a panel of at least two amino acid sequences, wherein at least one sequence in said panel is at least 90% identical to a sequence of at least 10 contiguous amino acids in a sequence selected from the above group.

[0832] Also preferred is a method for diagnosing in a subject a pathological condition associated with abnormal structure or expression of a nucleic acid sequence identified in Table 1 encoding a polypeptide, which method comprises a step of detecting in a biological sample obtained from said subject polypeptide molecules comprising an amino acid sequence in a panel of at least two amino acid sequences, wherein at least one sequence in said panel is at least 90% identical to a sequence of at least 10 contiguous amino acids in a sequence selected from the group consisting of: polypeptide sequence of SEQ ID NO:Y; a polypeptide encoded by SEQ ID NO:X; and a polypeptide encoded by the cDNA in the related cDNA clone referenced in Table 1.

[0833] In any of these methods, the step of detecting said polypeptide molecules includes using an antibody.

[0834] Also preferred is an isolated nucleic acid molecule comprising a nucleotide sequence which is at least 95% identical to a nucleotide sequence encoding a polypeptide wherein said polypeptide comprises an amino acid sequence that is at least 90% identical to a sequence of at least 10 contiguous amino acids in a sequence selected from the group consisting of: polypeptide sequence of SEQ ID NO:Y; a polypeptide encoded by SEQ ID NO:X; and a polypeptide encoded by the cDNA in the related cDNA clone referenced in Table 1.

[0835] Also preferred is an isolated nucleic acid molecule, wherein said nucleotide sequence encoding a polypeptide has been optimized for expression of said polypeptide in a prokaryotic host.

[0836] Also preferred is an isolated nucleic acid molecule, wherein said polypeptide comprises an amino acid sequence selected from the group consisting of: polypeptide sequence of SEQ ID NO:Y; a polypeptide encoded by SEQ ID NO:X; and a polypeptide encoded by the cDNA in the related cDNA clone referenced in Table 1.

[0837] Further preferred is a method of making a recombinant vector comprising inserting any of the above isolated nucleic acid molecule into a vector. Also preferred is the recombinant vector produced by this method. Also preferred is a method of making a recombinant host cell comprising introducing the vector into a host cell, as well as the recombinant host cell produced by this method.

[0838] Also preferred is a method of making an isolated polypeptide comprising culturing this recombinant host cell under conditions such that said polypeptide is expressed and recovering said polypeptide. Also preferred is this method of making an isolated polypeptide, wherein said recombinant host cell is a eukaryotic cell and said polypeptide is a human protein comprising an amino acid sequence selected from the group consisting of: polypeptide sequence of SEQ ID NO:Y; a polypeptide encoded by SEQ ID NO:X; and a polypeptide encoded by the cDNA in the related cDNA clone referenced in Table 1. The isolated polypeptide produced by this method is also preferred.

[0839] Also preferred is a method of treatment of an individual in need of an increased level of a protein activity, which method comprises administering to such an individual a Therapeutic comprising an amount of an isolated polypeptide, polynucleotide, immunogenic fragment or analogue thereof, binding agent, antibody, or antigen binding fragment of the claimed invention effective to increase the level of said protein activity in said individual.

[0840] Also preferred is a method of treatment of an individual in need of a decreased level of a protein activity, which method comprised administering to such an individual a Therapeutic comprising an amount of an isolated polypeptide, polynucleotide, immunogenic fragment or analogue thereof, binding agent, antibody, or antigen binding fragment of the claimed invention effective to decrease the level of said protein activity in said individual.

[0841] Having generally described the invention, the same will be more readily understood by reference to the following examples, which are provided by way of illustration and are not intended as limiting.

### EXAMPLES

### Example 1

[0842] Isolation of a Selected cDNA Clone From the Deposited Sample

[0843] Each deposited cDNA clone is contained in a plasmid vector. Table 5 identifies the vectors used to construct the cDNA library from which each clone was isolated. In many cases, the vector used to construct the library is a phage vector from which a plasmid has been excised. The following correlates the related plasmid for each phage vector used in constructing the cDNA library. For example, where a particular clone is identified in Table 5 as being isolated in the vector “Lambda Zap,” the corresponding deposited clone is in “pBluescript.”

| Vector Used to Construct Library | Corresponding Deposited Plasmid |
|---|---|
| Lambda Zap | pBluescript (pBS) |
| Uni-Zap XR | pBluescript (pBS) |
| Zap Express | pBK |
| lafmid BA | plafmid BA |
| pSport1 | pSport1 |
| pCMVSport 2.0 | pCMVSport 2.0 |
| pCMVSport 3.0 | pCMVSport 3.0 |
| pCR ® 2.1 | pCR ® 2.1 |

[0844] Vectors Lambda Zap (U.S. Pat. Nos. 5,128,256 and 5,286,636), Uni-Zap XR (U.S. Pat. Nos. 5,128, 256 and 5,286,636), Zap Express (U.S. Pat. Nos. 5,128,256 and 5,286,636), pBluescript (pBS) (Short, J. M. et al., Nucleic Acids Res. 16:7583-7600 (1988); Alting-Mees, M. A. and Short, J. M., Nucleic Acids Res. 17:9494 (1989)) and pBK (Alting-Mees, M. A. et al., Strategies 5:58-61 (1992)) are commercially available from Stratagene Cloning Systems, Inc., 11011 N. Torrey Pines Road, La Jolla, Calif., 92037. pBS contains an ampicillin resistance gene and pBK contains a neomycin resistance gene. Both can be transformed into E. coli strain XL-1 Blue, also available from Stratagene. pBS comes in 4 forms SK+, SK−, KS+and KS. The S and K refers to the orientation of the polylinker to the T7 and T3 primer sequences which flank the polylinker region (“S” is for SacI and “K” is for KpnI which are the first sites on each respective end of the linker). “+” or “−” refer to the orientation of the f1 origin of replication (“ori”), such that in one orientation, single stranded rescue initiated from the fl ori generates sense strand DNA and in the other, antisense.

[0845] Vectors pSportl, pCMVSport 2.0 and pCMVSport 3.0, were obtained from Life Technologies, Inc., P. O. Box 6009, Gaithersburg, Md. 20897. All Sport vectors contain an ampicillin resistance gene and may be transformed into E. coli strain DH10B, also available from Life Technologies. (See, for instance, Gruber, C. E., et al., Focus 15:59 (1993).) Vector lafmid BA (Bento Soares, Columbia University, NY) contains an ampicillin resistance gene and can be transformed into E. coli strain XL-1 Blue. Vector pCR®2.1, which is available from Invitrogen, 1600 Faraday Avenue, Carlsbad, Calif. 92008, contains an ampicillin resistance gene and may be transformed into E. coli strain DH10B, available from Life Technologies. (See, for instance, Clark, J. M., Nuc. Acids Res. 16:9677-9686 (1988) and Mead, D. et al., Bio/Technology 9: (1991).) Preferably, a polynucleotide of the present invention does not comprise the phage vector sequences identified for the particular clone in Table 5, as well as the corresponding plasmid vector sequences designated above.

[0846] The deposited material in the sample assigned the ATCC Deposit Number cited by reference to Table 2 and 5 for any given cDNA clone also may contain one or more additional plasmids, each comprising a cDNA clone different from that given clone. Thus, deposits sharing the same ATCC Deposit Number contain at least a plasmid for each cDNA clone referenced in Table 1.

| | | | ATCC |
|---|---|---|---|
| Libraries owned by Catalog | Catalog Description | Vector | Deposit |
| HPRA HPRB HPRC HPRD | Human Prostate | Uni-ZAP XR | LP03 |
| HSIA HSIC HSID HSIE | Human Adult Small Intestine | Uni-ZAP XR | LP03 |
| HTEA HTEB HTEC HTED HTEE | Human Testes | Uni-ZAP XR | LP03 |
| HTEF HTEG HTEH HTEI HTEJ | | | |
| HTEK | | | |
| HTPA HTPB HTPC HTPD HTPE | Human Pancreas Tumor | Uni-ZAP XR | LP03 |
| HTTA HTTB HTTC HTTD HTTE | Human Testes Tumor | Uni-ZAP XR | LP03 |
| HTTF | | | |
| HAPA HAPB HAPC HAPM | Human Adult Pulmonary | Uni-ZAP XR | LP03 |
| HETA HETB HETC HETD HETE | Human Endometrial Tumor | Uni-ZAP XR | LP03 |
| HETF HETG HETH HETI | | | |
| HHFB HHFC HHFD HHFE HHFF | Human Fetal Heart | Uni-ZAP XR | LP03 |
| HHFG HHFH HHFI | | | |
| HHPB HHPC HHPD HHPE HHPF | Human Hippocampus | Uni-ZAP XR | LP03 |
| HHPG HHPH | | | |
| HCE1 HCE2 HCE3 HCE4 HCE5 | Human Cerebellum | Uni-ZAP XR | LP03 |
| HCEB HCEC HCED HCEE HCEF | | | |
| HCEG | | | |
| HUVB HUVC HUVD HUVE | Human Umbilical Vein, Endo. remake | Uni-ZAP XR | LP03 |
| HSTA HSTB HSTC HSTD | Human Skin Tumor | Uni-ZAP XR | LP03 |
| HTAA HTAB HTAC HTAD HTAE | Human Activated T-Cells | Uni-ZAP XR | LP03 |
| HFEA HFEB HFEC | Human Fetal Epithelium (Skin) | Uni-ZAP XR | LP03 |
| HJPA HJPB HJPC HJPD | HUMAN JURKAT MEMBRANE | Uni-ZAP XR | LP03 |
| | BOUND POLYSOMES | | |
| HESA | Human epithelioid sarcoma | Uni-Zap XR | LP03 |
| HLTA HLTB HLTC HLTD HLTE | Human T-Cell Lymphoma | Uni-ZAP XR | LP03 |
| HLTF | | | |
| HFTA HFTB HFTC HFTD | Human Fetal Dura Mater | Uni-ZAP XR | LP03 |
| HRDA HRDB HRDC HRDD HRDE | Human Rhabdomyosarcoma | Uni-ZAP XR | LP03 |
| HRDF | | | |
| HCAA HCAB HCAC | Cem cells cyclohexamide treated | Uni-ZAP XR | LP03 |
| HRGA HRGB HRGC HRGD | Raji Cells, cyclohexamide treated | Uni-ZAP XR | LP03 |
| HSUA HSUB HSUC HSUM | Supt Cells, cyclohexamide treated | Uni-ZAP XR | LP03 |
| HT4A HT4C HT4D | Activated T-Cells, 12 hrs. | Uni-ZAP XR | LP03 |
| HE9A HE9B HE9C HE9D HE9E | Nine Week Old Early Stage Human | Uni-ZAP XR | LP03 |
| HEE9F HE9G HE9H HE9M HE9N | | | |
| HATA HATB HATC HATD HATE | Human Adrenal Gland Tumor | Uni-ZAP XR | LP03 |
| HT5A | Activated T-Cells, 24 hrs. | Uni-ZAP XR | LP03 |
| HFGA HFGM | Human Fetal Brain | Uni-ZAP XR | LP03 |
| HNEA HNEB HNEC HNED HNEE | Human Neutrophil | Uni-ZAP XR | LP03 |
| HBGB HBGD | Human Pilmary Breast Cancer | Uni-ZAP XR | LP03 |
| HBNA HBNB | Human Normal Breast | Uni-ZAP XR | LP03 |
| HCAS | Cem Cells, cyclohexamide treated, | Uni-ZAP XR | LP03 |
| | subtra | | |
| HHPS | Human Hippocampus, subtracted | pBS | LP03 |
| HKCS HKCU | Human Colon Cancer, subtracted | pBS | LP03 |
| HRGS | Raji cells, cyclohexamide treated, | pBS | LP03 |
| | subtracted | | |
| HSUT | Supt cells, cyclohexamide treated, | pBS | LP03 |
| | differentially expressed | | |
| HT4S | Activated T-Cells, 12 hrs, subtracted | Uni-ZAP XR | LP03 |
| HCDA HCDB HCDC HCDD HCDE | Human Chondrosarcoma | Uni-ZAP XR | LP03 |
| HOAA HOAB HOAC | Human Osteosarcoma | Uni-ZAP XR | LP03 |
| HTLA HTLB HTLC HTLD HTLE | Human adult testis, large inserts | Uni-ZAP XR | LP03 |
| HTLF | | | |
| HLMA HLMC HLMD | Breast Lymph node cDNA library | Uni-ZAP XR | LP03 |
| H6EA H6EB H6EC | HL-60, PMA 4H | Uni-ZAP XR | LP03 |
| HTXA HTXB HTXC HTXD HTXE | Activated T-Cell (12hs)/Thiouridine | Uni-ZAP XR | LP03 |
| HTXF HTXG HTXH | labelledEco | | |
| HNFA HNFB HNFC HNFD HNFE | Human Neutrophil, Activated | Uni-ZAP XR | LP03 |
| HNFF HNFG HNFH HNFJ | | | |
| HTOB HTOC | HUMAN TONSILS, FRACTION 2 | Uni-ZAP XR | LP03 |
| HMGB | Human OB MG63 control fraction I | Uni-ZAP XR | LP03 |
| HOPB | Human OB HOS control fraction I | Uni-ZAP XR | LP03 |
| HORB | Human OB HOS treated (10 nM E2) | Uni-ZAP XR | LP03 |
| | fraction I | | |
| HSVA HSVB HSVC | Human Chronic Synovitis | Uni-ZAP XR | LP03 |
| HRQA | HUMAN STOMACH | Uni-ZAP XR | LP03 |
| HBJA HBJB HBJC HBJD HBJE | HUMAN B CELL LYMPHOMA | Uni-ZAP XR | LP03 |
| HBJF HBJG HBJH HBJI HBJJ HBJK | | | |
| HCRA HCRB HCRC | human corpus colosum | Uni-ZAP XR | LP03 |
| HODA HODB HODC HODD | human ovarian cancer | Uni-ZAP XR | LP03 |
| HDSA | Dermatofibrosarcoma Protuberance | Uni-ZAP XR | LP03 |
| HMWA HMWB HMWC HMWD | Bone Marrow Cell Line (RS4;11) | Uni-ZAP XR | LP03 |
| HMWE HMWF HMWG HMWH | | | |
| HMWI HMWJ | | | |
| HSOA | stomach cancer (human) | Uni-ZAP XR | LP03 |
| HERA | SKIN | Uni-ZAP XR | LP03 |
| HMDA | Brain-medulloblastoma | Uni-ZAP XR | LP03 |
| HGLA HGLB HGLD | Glioblastoma | Uni-ZAP XR | LP03 |
| HEAA | H. Atrophic Endometrium | Uni-ZAP XR | LP03 |
| HBCA HBCB | H. Lymph node breast Cancer | Uni-ZAP XR | LP03 |
| HPWT | Human Prostate BPH, re-excision | Uni-ZAP XR | LP03 |
| HFVG HFVH HFVI | Fetal Liver, subtraction II | pBS | LP03 |
| HNFI | Human Neutrophils, Activated, re- | pBS | LP03 |
| | excision | | |
| HBMB HBMC HBMD | Human Bone Marrow, re-excision | pBS | LP03 |
| HKML HKMM HKMN | H. Kidney Medulla, re-excision | pBS | LP03 |
| HKIX HKIY | H. Kidney Cortex, subtracted | pBS | LP03 |
| HADT | H. Amygdala Depression, subtracted | pBS | LP03 |
| H6AS | Hl-60, untreated, subtracted | Uni-ZAP XR | LP03 |
| H6ES | HL-60, PMA 4H, subtracted | Uni-ZAP XR | LP03 |
| H6BS | HL-60, RA 4h, Subtracted | Uni-ZAP XR | LP03 |
| H6CS | HL-60, PMA 1d, subtracted | Uni-ZAP XR | LP03 |
| HTXJ HTXK | Activated T-cell(12h)/Thiouridine-re- | Uni-ZAP XR | LP03 |
| | excision | | |
| HMSA HMSB HMSC HMSD HMSE | Monocyte activated | Uni-ZAP XR | LP03 |
| HMSF HMSG HMSH HMSI HMSJ | | | |
| HMSK | | | |
| HAGA HAUB HAGC HAGD HAGE | Human Amygdala | Uni-ZAP XR | LP03 |
| HAGF | | | |
| HSRA HSRB HSRE | STROMAL-OSTEOCLASTOMA | Uni-ZAP XR | LP03 |
| HSRD HSRF HSRG HSRH | Human Osteoclastoma Stromal Cells - | Uni-ZAP XR | LP03 |
| | unamplified | | |
| HSQA HSQB HSQC HSQD HSQE | Stromal cell TF274 | Uni-ZAP XR | LP03 |
| HSQF HSQG | | | |
| HSKA HSKB HSKC HSKD HSKE | Smooth muscle, serum treated | Uni-ZAP XR | LP03 |
| HSKF HSKZ | | | |
| HSLA HSLB HSLC HSLD HSLE | Smooth muscle,control | Uni-ZAP XR | LP03 |
| HSLF HSLG | | | |
| HSDA HSDD HSDE HSDF HSDG | Spinal cord | Uni-ZAP XR | LP03 |
| HSDH | | | |
| HPWS | Prostate-BPH subtracted II | pBS | LP03 |
| HSKW HSKX HSKY | Smooth Muscle-HASTE normalized | pBS | LP03 |
| HFPB HFPC HFPD | H. Frontal cortex,epileptic;re-excision | Uni-ZAP XR | LP03 |
| HSDI HSDJ HSDK | Spinal Cord, re-excision | Uni-ZAP XR | LP03 |
| HSKN HSKO | Smooth Muscle Serum Treated, Norm | pBS | LP03 |
| HSKG HSKH HSKI | Smooth muscle, serum induced,re-exc | pBS | LP03 |
| HFCA HFCB HFCC HFCD HFCE | Human Fetal Brain | Uni-ZAP XR | LP04 |
| HFCF | | | |
| HPTA HPTB HPTD | Human Pituitary | Uni-ZAP XR | LP04 |
| HTHB HTHC HTHD | Human Thymus | Uni-ZAP XR | LP04 |
| HE6B HE6C HE6D HE6E HE6F | Human Whole Six Week Old Embryo | Uni-ZAP XR | LP04 |
| HE6G HE6S | | | |
| HSSA HSSB HSSC HSSD HSSE | Human Synovial Sarcoma | Uni-ZAP XR | LP04 |
| HSSF HSSG HSSH HSSI HSSJ | | | |
| HSSK | | | |
| HE7T | 7 Week Old Early Stage Human, | Uni-ZAP XR | LP04 |
| | subtracted | | |
| HEPA HEPB HEPC | Human Epididymus | Uni-ZAP XR | LP04 |
| HSNA HSNB HSNC HSNM HSNN | Human Synovium | Uni-ZAP XR | LP04 |
| HPFB HPFC HPFD HPFE | Human Prostate Cancer, Stage C fraction | Uni-ZAP XR | LP04 |
| HE2A HE2D HE2E HE2H HE2I | 12 Week Old Early Stage Human | Uni-ZAP XR | LP04 |
| HE2M HE2N HE2O | | | |
| HE2B HE2C HE2F HE2G HE2P | 12 Week Old Early Stage Human, II | Uni-ZAP XR | LP04 |
| HE2Q | | | |
| HPTS HPTT HPTU | Human Pituitary, subtracted | Uni-ZAP XR | LP04 |
| HAUA HAUB HAUC | Amniotic Cells - TNF induced | Uni-ZAP XR | LP04 |
| HAQA HAQB HAQC HAQD | Amniotic Cells - Primary Culture | Uni-ZAP XR | LP04 |
| HWTA HWTB HWTC | wilm's tumor | Uni-ZAP XR | LP04 |
| HBSD | Bone Cancer, re-excision | Uni-ZAP XR | LP04 |
| HSGB | Salivary gland, re-excision | Uni-ZAP XR | LP04 |
| HSJA HSJB HSJC | Smooth muscle-ILb induced | Uni-ZAP XR | LP04 |
| HSXA HSXB HSXC HSXD | Human Substantia Nigra | Uni-ZAP XR | LP04 |
| HSHA HSHB HSHC | Smooth muscle, IL1b induced | Uni-ZAP XR | LP04 |
| HOUA HOUB HOUC HOUD HOUE | Adipocytes | Uni-ZAP XR | LP04 |
| HPWA HPWB HPWC HPWD | Prostate BPH | Uni-ZAP XR | LP04 |
| HPWE | | | |
| HELA HELB HELC HELD HELE | Endothelial cells-control | Uni-ZAP XR | LP04 |
| HELF HELG HELH | | | |
| HEMA HEMB HEMC HEMD | Endothelial-induced | Uni-ZAP XR | LP04 |
| HEME HEMF HEMG HEMH | | | |
| HBIA HBIB UBIC | Human Brain, Striatum | Uni-ZAP XR | LP04 |
| HHSA HHSB HHSC HHSD HHSE | Human Hypothalmus,Schizophrenia | Uni-ZAP XR | LP04 |
| HNGA HNGB HNGC HNGD HNGE | neutrophils control | Uni-ZAP XR | LP04 |
| HNGF HNGG HNGH HNGI HNGJ | | | |
| HNHA HNHB HNHC HNHD HNHE | Neutrophils IL-1 and LPS induced | Uni-ZAP XR | LP04 |
| HNHF HNHG HNHH HNHI HNHJ | | | |
| HSDB HSDC | STRIATUM DEPRESSION | Uni-ZAP XR | LP04 |
| HHPT | Hypothalamus | Uni-ZAP XR | LP04 |
| HSAT HSAU HSAV HSAW HSAX | Anergic T-cell | Uni-ZAP XR | LP04 |
| HSAY HSAZ | | | |
| HBMS HBMT HBMU HBMV | Bone marrow | Uni-ZAP XR | LP04 |
| HBMW HBMX | | | |
| HOEA HOEB HOEC HOED HOEE | Osteoblasts | Uni-ZAP XR | LP04 |
| HOEF HOEJ | | | |
| HAIA HAIE HAIC HAID HAIE | Epithelial-TNFa and INF induced | Uni-ZAP XR | LP04 |
| HAIF | | | |
| HTGA HTGB HTGC HTGD | Apoptotic T-cell | Uni-ZAP XR | LP04 |
| HMCA HMCB HMCC HMCD | Macrophage-oxLDL | Uni-ZAP XR | LP04 |
| HMCE | | | |
| HMAA HMAB HMAC HMAD | Macrophage (GM-CSF treated) | Uni-ZAP XR | LP04 |
| HMAE HMAF HMAG | | | |
| HPHA | Normal Prostate | Uni-ZAP XR | LP04 |
| HPIA HPIB HPIC | LNCAP prostate cell line | Uni-ZAP XR | LP04 |
| HPJA HPJB HPJC | PC3 Prostate cell line | Uni-ZAP XR | LP04 |
| HOSE HOSF HOSG | Human Osteoclastoma, re-excision | Uni-ZAP XR | LP04 |
| HTGE HTGF | Apoptotic T-cell, re-excision | Uni-ZAP XR | LP04 |
| HMAJ HMAK | H Macrophage (GM-CSF treated), re- | Uni-ZAP XR | LP04 |
| | excision | | |
| HACB HACC HACD | Human Adipose Tissue, re-excision | Uni-ZAP XR | LP04 |
| HFPA | H. Frontal Cortex, Epileptic | Uni-ZAP XR | LP04 |
| HFAA HFAB HFAC HFAD HFAE | Alzheimers, spongy change | Uni-ZAP XR | LP04 |
| HFAM | Frontal Lobe, Dementia | Uni-ZAP XR | LP04 |
| HMIA HMIB HMIC | Human Manic Depression Tissue | Uni-ZAP XR | LP04 |
| HTSA HTSE HTSF HTSG HTSH | Human Thymus | pBS | LP05 |
| HPBA HPBB HPBC HPBD HPBE | Human Pineal Gland | pBS | LP05 |
| HSAA HSAB HSAC | HSA 172 Cells | pBS | LP05 |
| HSBA HSBB HSBC HSBM | HSC172 cells | pBS | LP05 |
| HJAA HJAB HIAC HJAD | Jurkat T-cell G1 phase | pBS | LP05 |
| HJBA HJBB HJBC HJBD | Jurkat T-Cell, S phase | pBS | LP05 |
| HAFA HAFB | Aorta endothelial cells + TNF-a | pBS | LP05 |
| HAWA HAWB HAWC | Human White Adipose | pBS | LP05 |
| HTNA HTNB | Human Thyroid | pBS | LP05 |
| HONA | Normal Ovary, Premenopausal | pBS | LP05 |
| HARA HARB | Human Adult Retina | pBS | LP05 |
| HLJA HLJB | Human Lung | pCMVSport 1 | LP06 |
| HOFM HOFN HOFO | H. Ovarian Tumor, II, OV5232 | pCMVSport 2.0 | LP07 |
| HOGA HOGB HOGC | OV 10-3-95 | pCMVSport 2.0 | LP07 |
| HCGL | CD34 + cells, II | pCMVSport 2.0 | LP07 |
| HDLA | Hodgkin's Lymphoma I | pCMVSport 2.0 | LP07 |
| HDTA HDTB HDTC HDTD HDTE | Hodgkin's Lymphoma II | pCMVSport 2.0 | LP07 |
| HKAA HKAB HKAC HKAD HKAE | Keratinocyte | pCMVSport2.0 | LP07 |
| HKAF HKAG HKAH | | | |
| HCIM | CAPFINDER, Crohn's Disease, lib 2 | pCMVSport 2.0 | LP07 |
| HKAL | Keratinocyte, lib 2 | pCMVSport2.0 | LP07 |
| HKAT | Keratinocyte, lib 3 | pCMVSport2.0 | LP07 |
| HNDA | Nasal polyps | pCMVSport2.0 | LP07 |
| HDRA | H. Primary Dendritic Cells,lib 3 | pCMVSport2.0 | LP07 |
| HOHA HOHB HOHC | Human Osteoblasts II | pCMVSport2.0 | LP07 |
| HLDA HLDB HLDC | Liver, Hepatoma | pCMVSport3.0 | LP08 |
| HLDN HLDO HLDP | Human Liver, normal | pCMVSport3.0 | LP08 |
| HMTA | pBMC stimulated w/poly I/C | pCMVSport3.0 | LP08 |
| HNTA | NTERA2, control | pCMVSport3.0 | LP08 |
| HDPA HDPB HDPC HDPD HDPF | Primary Dendritic Cells, lib 1 | pCMVSport3.0 | LP08 |
| HDPG HDPH HDPI HDPJ HDPK | | | |
| HDPM HDPN HDPO HDPP | Primary Dendritic cells,frac 2 | pCMVSport3.0 | LP08 |
| HMUA HMUB HMUC | Myoloid Progenitor Cell Line | pCMVSport3.0 | LP08 |
| HHEA HHEB HHEC HHED | T Cell helper I | pCMVSport3.0 | LP08 |
| HHEM HHEN HHEO HHEP | T cell helper II | pCMVSport3.0 | LP08 |
| HEQA HEQB HEQC | Human endometrial stromal cells | pCMVSport3.0 | LP08 |
| HJMA HJMB | Human endometrial stromal cells-treated | pCMVSport3.0 | LP08 |
| | with progesterone | | |
| HSWA HSWB HSWC | Human endometrial stromal cells-treated | pCMVSport3.0 | LP08 |
| | with estradiol | | |
| HSYA HSYB HSYC | Human Thymus Stromal Cells | pCMVSport3.0 | LP08 |
| HLWA HLWB HLWC | Human Placenta | pCMVSport3.0 | LP08 |
| HRAA HRAB HRAC | Rejected Kidney, lib 4 | pCMVSport3.0 | LP08 |
| HMTM | PCR, pBMC I/C treated | PCRII | LP09 |
| HMJA | H. Meningima, M6 | pSport 1 | LP10 |
| HMKA HMKB HMKC HMKD | H. Meningima, M1 | pSport 1 | LP10 |
| HMKE | | | |
| HUSG HUSI | Human umbilical vein endothelial cells, | pSport 1 | LP10 |
| | IL-4 induced | | |
| HUSX HUSY | Human Umbilical Vein Endothelial | pSport 1 | LP10 |
| | Cells, uninduced | | |
| HOFA | Ovarian Tumor I, OV5232 | pSport 1 | LP10 |
| HCFA HCFB HCFC HCFD | T-Cell PHA 16 hrs | pSport 1 | LP10 |
| HCFL HCFM HCFN HCFO | T-Cell PHA 24 hrs | pSport 1 | LP10 |
| HADA HADC HADD HADE HADF | Human Adipose | pSport 1 | LP10 |
| HADG | | | |
| HOVA HOVB HOVC | Human Ovary | pSport 1 | LP10 |
| HTWB HTWC HTWD HTWE | Resting T-Cell Library,II | pSport 1 | LP10 |
| HTWF | | | |
| HMMA | Spleen metastic melanoma | pSport 1 | LP10 |
| HLYA HLYB HLYC HLYD HLYE | Spleen, Chronic lymphocytic leukemia | pSport 1 | LP10 |
| HCGA | CD34 + cell, I | pSport 1 | LP10 |
| HEOM HEON | Human Eosinophils | pSport 1 | LP10 |
| HTDA | Human Tonsil, Lib 3 | pSport 1 | LP10 |
| HSPA | Salivary Gland, Lib 2 | pSport 1 | LP10 |
| HCHA HCHB HCHC | Breast Cancer cell line, MDA 36 | pSport 1 | LP10 |
| HCHM HCHN | Breast Cancer Cell line, angiogenic | pSport 1 | LP10 |
| HCIA | Crohn's Disease | pSport 1 | LP10 |
| HDAA HDAB HDAC | HEL cell line | pSport 1 | LP10 |
| HABA | Human Astrocyte | pSport 1 | LP10 |
| HUFA HUFB HUFC | Ulcerative Colitis | pSport 1 | LP10 |
| HNTM | NTERA2 + retinoic acid, 14 days | pSport 1 | LP10 |
| HDQA | Primary Dendritic cells,CapFinder2, frac 1 | pSport 1 | LP10 |
| HDQM | Primary Dendritic Cells, CapFinder, frac 2 | pSport 1 | LP10 |
| HLDX | Human Liver, normal,CapFinder □ □ □ □ | pSport 1 | LP10 |
| HULA HULB HULC | Human Dermal Endothelial | pSport1 | LP10 |
| | Cells,untreated | | |
| HUMA | Human Dermal Endothelial cells,treated | pSport1 | LP10 |
| HCJA | Human Stromal Endometrial fibroblasts, | pSport1 | LP10 |
| | untreated | | |
| HCJM | Human Stromal endometrial fibroblasts, | pSport1 | LP10 |
| | treated w/estradiol | | |
| HEDA | Human Stromal endometrial fibroblasts, | pSport1 | LP10 |
| | treated with progesterone | | |
| HFNA | Human ovary tumor cell OV350721 | pSport1 | LP10 |
| HKGA HKGB HKGC HKGD | Merkel Cells | pSport1 | LP10 |
| HISA HISB HISC | Pancreas Islet Cell Tumor | pSport1 | LP10 |
| HLSA | Skin, burned | pSport1 | LP10 |
| HBZA | Prostate,BPH, Lib 2 | pSport 1 | LP10 |
| HBZS | Prostate BPH,Lib 2, subtracted | pSport 1 | LP10 |
| HFIA HFIB HFIC | Synovial Fibroblasts (control) | pSport 1 | LP10 |
| HFIH HFII HFIJ | Synovial hypoxia | pSport 1 | LP10 |
| HFIT HFIU HFIV | Synovial IL-1/TNF stimulated | pSport 1 | LP10 |
| HGCA | Messangial cell, frac 1 | pSport1 | LP10 |
| HMVA HMVB HMVC | Bone Marrow Stromal Cell, untreated | pSport1 | LP10 |
| HFIX HFIY HFIZ | Synovial Fibroblasts (I11/TNF), subt | pSport1 | LP10 |
| HFOX HFOY HFOZ | Synovial hypoxia-RSF subtracted | pSport1 | LP10 |
| HMQA HMQB HMQC HMQD | Human Activated Monocytes | Uni-ZAP XR | LP11 |
| HLIA HLIB HLIC | Human Liver | pCMVSport 1 | LP012 |
| HHBA HHBB HHBC HHBD HHBE | Human Heart | pCMVSport 1 | LP012 |
| HBBA HBBB | Human Brain | pCMVSport 1 | LP012 |
| HLJA HLJB HLJC HLJD HLJE | Human Lung | pCMVSport 1 | LP012 |
| HOGA HOGB HOGC | Ovarian Tumor | pCMVSport 2.0 | LP012 |
| HTJM | Human Tonsils, Lib 2 | pCMVSport 2.0 | LP012 |
| HAMF HAMG | KMH2 | pCMVSport 3.0 | LP012 |
| HAJA HAJB HAJC | L428 | pCMVSport 3.0 | LP012 |
| HWBA HWBB HWBC HWBD | Dendritic cells, pooled | pCMVSport 3.0 | LP012 |
| HWBE | | | |
| HWAA HWAB HWAC HWAD | Human Bone Marrow, treated | pCMVSport 3.0 | LP012 |
| HWAE | | | |
| HYAA HYAB HYAC | B Cell lymphoma | pCMVSport 3.0 | LP012 |
| HWHG HWHH HWHI | Healing groin wound, 6.5 hours post | pCMVSport 3.0 | LP012 |
| | incision | | |
| HWHP HWHQ HWHR | Healing groin wound; 7.5 hours post | pCMVSport 3.0 | LP012 |
| | incision | | |
| HARM | Healing groin wound - zero hr post- | pCMVSport 3.0 | LP012 |
| | incision (control) | | |
| HBIM | Olfactory epithelium; nasalcavity | pCMVSport 3.0 | LP012 |
| HWDA | Healing Abdomen wound; 70&90 min | pCMVSport 3.0 | LP012 |
| | post incision | | |
| HWEA | Healing Abdomen Wound;15 days post | pCMVSport 3.0 | LP012 |
| | incision | | |
| HWJA | Healing Abdomen Wound;21&29 days | pCMVSport 3.0 | LP012 |
| HNAL | Human Tongue, frac 2 | pSport1 | LP012 |
| HMJA | H. Meningima, M6 | pSport1 | LP012 |
| HMKA HMKB HMKC HMKD | H. Meningima, M1 | pSport1 | LP012 |
| HMKE | | | |
| HOFA | Ovarian Tumor I, OV5232 | pSport1 | LP012 |
| HCFA HCFB HCFC HCFD | T-Cell PHA 16 hrs | pSport1 | LP012 |
| HCFL HCFM HCFN HCFO | T-Cell PHA 24 hrs | pSport1 | LP012 |
| HMMA HMMB HMMC | Spleen metastic melanoma | pSport1 | LP012 |
| HTDA | Human Tonsil, Lib 3 | pSport1 | LP012 |
| HDBA | Human Fetal Thymus | pSport1 | LP012 |
| HDUA | Pericardium | pSport1 | LP012 |
| HBZA | Prostate,BPH, Lib 2 | pSport1 | LP012 |
| HWCA | Larynx tumor | pSport1 | LP012 |
| HWKA | Normal lung | pSport1 | LP012 |
| HSMB | Bone marrow stroma,treated | pSport1 | LP012 |
| HBHM | Normal trachea | pSport1 | LP012 |
| HLFC | Human Larynx | pSport1 | LP012 |
| HLRB | Siebben Polyposis | pSport1 | LP012 |
| HNIA | Mammary Gland | pSport1 | LP012 |
| HNJB | Palate carcinoma | pSport1 | LP012 |
| HNKA | Palate normal | pSport1 | LP012 |
| HMZA | Pharynx carcinoma | pSport1 | LP012 |
| HABG | Cheek Carcinoma | pSport1 | LP012 |
| HMZM | Pharynx Carcinoma | pSport1 | LP012 |
| HDRM | Larynx Carcinoma | pSport1 | LP012 |
| HVAA | Pancreas normal PCA4 No | pSport1 | LP012 |
| HICA | Tongue carcinoma | pSport1 | LP012 |
| HUKA HUKB HUKC HUKD HUKE | Human Uterine Cancer | Lambda ZAP II | LP013 |
| HFFA | Human Fetal Brain, random primed | Lambda ZAP II | LP013 |
| HTUA | Activated T-cell labeled with 4-thioluri | Lambda ZAP II | LP013 |
| HBQA | Early Stage Human Brain, random | Lambda ZAP II | LP013 |
| | primed | | |
| HMEB | Human microvascular Endothelial cells, | Lambda ZAP II | LP013 |
| | fract. B | | |
| HUSH | Human Umbilical Vein Endothelial | Lambda ZAP II | LP013 |
| | cells, fract. A, re-excision | | |
| HLQC HLQD | Hepatocellular tumor, re-excision | Lambda ZAP II | LP013 |
| HTWJ HTWK HTWL | Resting T-cell, re-excision | Lambda ZAP II | LP013 |
| HF6S | Human Whole 6 week Old Embryo (II), | pBluescript | LP013 |
| | subt | | |
| HHPS | Human Hippocampus, subtracted | pBluescript | LP013 |
| HL1S | LNCAP, differential expression | pBluescript | LP013 |
| HLHS HLHT | Early Stage Human Lung, Subtracted | pBluescript | LP013 |
| HSUS | Supt cells, cyclohexamide treated, | pBluescript | LP013 |
| | subtracted | | |
| HSUT | Supt cells, cyclohexamide treated, | pBluescript | LP013 |
| | differentially expressed | | |
| HSDS | H. Striatum Depression, subtracted | pBluescript | LP013 |
| HPTZ | Human Pituitary, Subtracted VII | pBluescript | LP013 |
| HSDX | H. Striatum Depression, subt II | pBluescript | LP013 |
| HSDZ | H. Striatum Depression, subt | pBluescript | LP013 |
| HPBA HPBB HPBC HPBD HPBE | Human Pineal Gland | pBluescript SK- | LP013 |
| HRTA | Colorectal Tumor | pBluescript SK- | LP013 |
| HSBA HSBB HSBC HSBM | HSC172 cells | pBluescript SK- | LP013 |
| HJAA HJAB HJAC HJAD | Jurkat T-cell G1 phase | pBluescript SK- | LP013 |
| HJBA HJBB HJBC HJBD | Jurkat T-cell, S1 phase | pBluescript SK- | LP013 |
| HTNA HTNB | Human Thyroid | pBluescript SK- | LP013 |
| HAHA HAHB | Human Adult Heart | Uni-ZAP XR | LP013 |
| HE6A | Whole 6 week Old Embryo | Uni-ZAP XR | LP013 |
| HFCA HFCB HFCC HFCD HFCE | Human Fetal Brain | Uni-ZAP XR | LP013 |
| HFKC HFKD HFKE HFKF HFKG | Human Fetal Kidney | Uni-ZAP XR | LP013 |
| HGBA HGBD HGBE HGBF HGBG | Human Gall Bladder | Uni-ZAP XR | LP013 |
| HPRA HPRB HPRC HPRD | Human Prostate | Uni-ZAP XR | LP013 |
| HTEA HTEB HTEC HTED HTEE | Human Testes | Uni-ZAP XR | LP013 |
| HTTA HTTB HYIC HTTD HUE | Human Testes Tumor | Uni-ZAP XR | LP013 |
| HYBA HYBB | Human Fetal Bone | Uni-ZAP XR | LP013 |
| HFLA | Human Fetal Liver | Uni-ZAP XR | LP013 |
| HHFB HHFC HHFD HHFE HHFF | Human Fetal Heart | Uni-ZAP XR | LP013 |
| HUVB HUVC HUVD HUVE | Human Umbilical Vein, End. remake | Uni-ZAP XR | LP013 |
| HTHB HTHC HTHD | Human Thymus | Uni-ZAP XR | LP013 |
| HSTA HSTB HSTC HSTD | Human Skin Tumor | Uni-ZAP XR | LP013 |
| HTAA HTAB HTAC HTAD HTAE | Human Activated T-cells | Uni-ZAP XR | LP013 |
| HFEA HFEB HFEC | Human Fetal Epithelium (skin) | Uni-ZAP XR | LP013 |
| HJPA HJPB HJPC HJPD | Human Jurkat Membrane Bound | Uni-ZAP XR | LP013 |
| | Polysomes | | |
| HESA | Human Epithelioid Sarcoma | Uni-ZAP XR | LP013 |
| HALS | Human Adult Liver, Subtracted | Uni-ZAP XR | LP013 |
| HFTA HFTB HFTC HFTD | Human Fetal Dura Mater | Uni-ZAP XR | LP013 |
| HCAA HCAB HCAC | Cem cells, cyclohexamide treated | Uni-ZAP XR | LP013 |
| HRGA HRGB HRGC HRGD | Raji Cells, cyclohexamide treated | Uni-ZAP XR | LP013 |
| HE9A FLE9B HE9C HE9D HE9E | Nine Week Old Early Stage Human | Uni-ZAP XR | LP013 |
| HSFA | Human Fibrosarcoma | Uni-ZAP XR | LP013 |
| HATA HATB HATC HATD HATE | Human Adrenal Gland Tumor | Uni-ZAP XR | LP013 |
| HTRA | Human Trachea Tumor | Uni-ZAP XR | LP013 |
| HE2A HE2D HE2E HE2H HE2I | 12 Week Old Early Stage Human | Uni-ZAP XR | LP013 |
| HE2B HE2C HE2F HE2G HE2P | 12 Week Old Early Stage Human, II | Uni-ZAP XR | LP013 |
| HNEA HNEB HNEC HNED HNEE | Human Neutrophil | Uni-ZAP XR | LP013 |
| HBGA | Human Primary Breast Cancer | Uni-ZAP XR | LP013 |
| HPTS HPTT HPTU | Human Pituitary, subtracted | Uni-ZAP XR | LP013 |
| HMQA HMQB HMQC HMQD | Human Activated Monocytes | Uni-ZAP XR | LP013 |
| HOAA HOAB HOAC | Human Osteosarcoma | Uni-ZAP XR | LP013 |
| HTOA HTOD HTOE HTOF HTOG | human tonsils | Uni-ZAP XR | LP013 |
| HMGB | Human OB MG63 control fraction I | Uni-ZAP XR | LP013 |
| HOPB | Human OB HOS control fraction I | Uni-ZAP XR | LP013 |
| HOQB | Human OB HOS treated (1 nM E2) | Uni-ZAP XR | LP013 |
| | fraction I | | |
| HAUA HAUB HAUC | Amniotic Cells - TNF induced | Uni-ZAP XR | LP013 |
| HAQA HAQB HAQC HAQD | Amniotic Cells - Primary Culture | Uni-ZAP XR | LP013 |
| HROA HROC | HUMAN STOMACH | Uni-ZAP XR | LP013 |
| HBJA HBJB HBJC HBJD HBJE | HUMAN B CELL LYMPHOMA | Uni-ZAP XR | LP013 |
| HODA HODB HODC HODD | human ovarian cancer | Uni-ZAP XR | LP013 |
| HCPA | Corpus Callosum | Uni-ZAP XR | LP013 |
| HSOA | stomach cancer (human) | Uni-ZAP XR | LP013 |
| HERA | SKIN | Uni-ZAP XR | LP013 |
| HMDA | Brain-medulloblastoma | Uni-ZAP XR | LP013 |
| HGLA HGLB HGLD | Glioblastoma | Uni-ZAP XR | LP013 |
| HWTA HWTB HWTC | wilm's tumor | Uni-ZAP XR | LP013 |
| HEAA | H. Atrophic Endometrium | Uni-ZAP XR | LP013 |
| HAPN HAPO HAPP HAPQ HAPR | Human Adult Pulmonary;re-excision | Uni-ZAP XR | LP013 |
| HLTG HLTH | Human T-cell lymphoma;re-excision | Uni-ZAP XR | LP013 |
| HAHC HAHD HAHE | Human Adult Heart;re-excision | Uni-ZAP XR | LP013 |
| HAGA HAGB HAGC HAGD HAGE | Human Amygdala | Uni-ZAP XR | LP013 |
| HSJA HSJB HSJC | Smooth muscle-ILb induced | Uni-ZAP XR | LP013 |
| HSHA HSHB HSHC | Smooth muscle, IL1b induced | Uni-ZAP XR | LP013 |
| HPWA HPWB HPWC HPWD | Prostate BPH | Uni-ZAP XR | LP013 |
| HPWE | | | |
| HPIA HPIB HPIC | LNCAP prostate cell line | Uni-ZAP XR | LP013 |
| HPJA HPJB HIPJC | PC3 Prostate cell line | Uni-ZAP XR | LP013 |
| HBTA | Bone Marrow Stroma, TNF&LPS ind | Uni-ZAP XR | LP013 |
| HMCF HMCG HMCH HMCI HMCJ | Macrophage-oxLDL; re-excision | Uni-ZAP XR | LP013 |
| HAGG HAGH HAGI | Human Amygdala;re-excision | Uni-ZAP XR | LP013 |
| HACA | H. Adipose Tissue | Uni-ZAP XR | LP013 |
| HKFB | K562 + PMA (36 hrs),re-excision | ZAP Express | LP013 |
| HCWT HCWU HCWV | CD34 positive cells (cord blood),re-ex | ZAP Express | LP013 |
| HBWA | Whole brain | ZAP Express | LP013 |
| HBXA HBXB HBXC HBXD | Human Whole Brain #2 - Oligo dT> | ZAP Express | LP013 |
| | 1.5 Kb | | |
| HAVM | Temporal cortex-Alzheizmer | pT-Adv | LP014 |
| HAVT | Hippocampus, Alzheimer Subtracted | pT-Adv | LP014 |
| HHAS | CHME Cell Line | Uni-ZAP XR | LP014 |
| HAJR | Larynx normal | pSport 1 | LP014 |
| HWLE HWLF HWLG HWLH | Colon Normal | pSport 1 | LP014 |
| HCRM HCRN HCRO | Colon Carcinoma | pSport 1 | LP014 |
| HWLI HWLJ HWLK | Colon Normal | pSport 1 | LP014 |
| HWLQ HWLR HWLS HWLT | Colon Tumor | pSport 1 | LP014 |
| HBFM | Gastrocnemius Muscle | pSport 1 | LP014 |
| HBOD HBOE | Quadriceps Muscle | pSport 1 | LP014 |
| HBKD HBKE | Soleus Muscle | pSport 1 | LP014 |
| HCCM | Pancreatic Langerhans | pSport 1 | LP014 |
| HWGA | Larynx carcinoma | pSport 1 | LP014 |
| HWGM HWGN | Larynx carcinoma | pSport 1 | LP014 |
| HWLA HWLB HWLC | Normal colon | pSport 1 | LP014 |
| HWLM HWLN | Colon Tumor | pSport 1 | LP014 |
| HVAM HVAN HVAO | Pancreas Tumor | pSport 1 | LP014 |
| HWGQ | Larynx carcinoma | pSport 1 | LP014 |
| HAQM HAQN | Salivary Gland | pSport 1 | LP014 |
| HASM | Stomach; normal | pSport 1 | LP014 |
| HBCM | Uterus; normal | pSport 1 | LP014 |
| HCDM | Testis; normal | pSport 1 | LP014 |
| HDJM | Brain; normal | pSport 1 | LP014 |
| HEFM | Adrenal Gland,normal | pSport 1 | LP014 |
| HBAA | Rectum normal | pSport 1 | LP014 |
| HFDM | Rectum tumour | pSport 1 | LP014 |
| HGAM | Colon, normal | pSport 1 | LP014 |
| HHMM | Colon, tumour | pSport 1 | LP014 |
| HCLB HCLC | Human Lung Cancer | Lambda Zap II | LP015 |
| HRLA | L1 Cell line | ZAP Express | LP015 |
| HHAM | Hypothalamus, Alzheimer's | pCMVSport 3.0 | LP015 |
| HKBA | Ku 812F Basophils Line | pSport 1 | LP015 |
| HS2S | Saos2, Dexamethosome Treated | pSport 1 | LP016 |
| HA5A | Lung Carcinoma A549 TNFalpha | pSport 1 | LP016 |
| | activated | | |
| HTFM | TF-1 Cell Line GM-CSF Treated | pSport 1 | LP016 |
| HYAS | Thyroid Tumour | pSport 1 | LP016 |
| HUTS | Larynx Normal | pSport 1 | LP016 |
| HXOA | Larynx Tumor | pSport 1 | LP016 |
| HEAH | Ea.hy.926 cell line | pSport 1 | LP016 |
| HINA | Adenocarcinoma Human | pSport 1 | LP016 |
| HRMA | Lung Mesothelium | pSport 1 | LP016 |
| HLCL | Human Pre-Differentiated Adipocytes | Uni-Zap XR | LP017 |
| HS2A | Saos2 Cells | pSport 1 | LP020 |
| HS2I | Saos2 Cells; Vitamin D3 Treated | pSport 1 | LP020 |
| HUCM | CHME Cell Line, untreated | pSport 1 | LP020 |
| HEPN | Aryepiglottis Normal | pSport 1 | LP020 |
| HPSN | Sinus Piniformis Tumour | pSport 1 | LP020 |
| HNSA | Stomach Normal | pSport 1 | LP020 |
| HNSM | Stomach Tumour | pSport 1 | LP020 |
| HNLA | Liver Normal Met5No | pSport 1 | LP020 |
| HUTA | Liver Tumour Met 5 Tu | pSport 1 | LP020 |
| HOCN | Colon Normal | pSport 1 | LP020 |
| HOCT | Colon Tumor | pSport 1 | LP020 |
| HTNT | Tongue Tumour | pSport 1 | LP020 |
| HLXN | Larynx Normal | pSport 1 | LP020 |
| HLXT | Larynx Tumour | pSport 1 | LP020 |
| HTYN | Thymus | pSport 1 | LP020 |
| HPLN | Placenta | pSport 1 | LP020 |
| HTNG | Tongue Normal | pSport 1 | LP020 |
| HZAA | Thyroid Normal (SDCA2 No) | pSport 1 | LP020 |
| HWES | Thyroid Thyroiditis | pSport 1 | LP020 |
| HFHD | Ficolled Human Stromal Cells, 5Fu | pTrip1Ex2 | LP021 |
| | treated | | |
| HFHM,HFHN | Ficolled Human Stromal Cells, | pTrip1Ex2 | LP021 |
| | Untreated | | |
| HPCI | Hep G2 Cells, lambda library | lambda Zap-CMV XR | LP021 |
| HBCA,HBCB,HBCC | H. Lymph node breast Cancer | Uni-ZAP XR | LP021 |
| HCOK | Chondrocytes | pSPORT1 | LP022 |
| HDCA, HDCB, HDCC | Dendritic Cells From CD34 Cells | pSPORT1 | LP022 |
| HDMA, HDMB | CD40 activated monocyte dendritic cells | pSPORT1 | LP022 |
| HDDM, HDDN, HDDO | LPS activated derived dendritic cells | pSPORT1 | LP022 |
| HPCR | Hep G2 Cells, PCR library | lambda Zap-CMV XR | LP022 |
| HAAA, HAAB, HAAG | Lung, Cancer (4005313A3): Invasive | pSPORT1 | LP022 |
| | Poorly Differentiated Lung | | |
| | Adenocarcinoma | | |
| HIPA, HIIPB, HIPC | Lung, Cancer (4005163 B7): Invasive, | pSPORT1 | LP022 |
| | Poorly Diff. Adenocarcinoma, | | |
| | Metastatic | | |
| HOOH, HOOI | Ovary, Cancer: (4004562 B6) Papillary | pSPORT1 | LP022 |
| | Serous Cystic Neoplasm, Low | | |
| | Malignant Pot | | |
| HIDA | Lung, Normal: (4005313 B1) | pSPORT1 | LP022 |
| HUJA,HUJB,HUJC,HUJD,HUJE | B-Cells | pCMVSport 3.0 | LP022 |
| HNOA,HNOB,HNOC,HNOD | Ovary, Normal: (9805C040R) | pSPORT1 | LP022 |
| HNLM | Lung, Normal: (4005313 B1) | pSPORT1 | LP022 |
| HSCL | Stromal Cells | pSPORT1 | LP022 |
| HAAX | Lung, Cancer: (4005313 A3) Invasive | pSPORT1 | LP022 |
| | Poorly-differentiated Metastatic lung | | |
| | adenocarcinoma | | |
| HUUA,HUUB,HUUC,HUUD | B-cells (unstimulated) | pTrip1Ex2 | LP022 |
| HWWA,HWWB,HWWC,HWWD, | B-cells (stimulated) | pSPORT1 | LP022 |
| HWWE,HWWF,HWWG | | | |
| HCCC | Colon, Cancer: (9808C064R) | pCMVSport 3.0 | LP023 |
| HPDO HPDP HPDQ HPDR HPD | Ovary, Cancer (9809C332): Poorly | pSport 1 | LP023 |
| | differentiated adenocarcinoma | | |
| HPCO HPCP HPCQ HPCT | Ovary, Cancer (15395A1F): Grade II | pSport 1 | LP023 |
| | Papillary Carcinoma | | |
| HOCM HOCO HOCP HOCQ | Ovary, Cancer: (15799A1F) Poorly | pSport 1 | LP023 |
| | differentiated carcinoma | | |
| HCBM HCBN HCBO | Breast, Cancer: (4004943 A5) | pSport 1 | LP023 |
| HNBT HNBU HNBV | Breast, Normal: (4005522B2) | pSport 1 | LP023 |
| HBCP HBCQ | Breast, Cancer: (4005522 A2) | pSport 1 | LP023 |
| HBCJ | Breast, Cancer: (9806C012R) | pSport 1 | LP023 |
| HSAM HSAN | Stromal cells 3.88 | pSport 1 | LP023 |
| HVCA HVCB HVCC HVCD | Ovary, Cancer: (4004332 A2) | pSport 1 | LP023 |
| HSCK HSEN HSEO | Stromal cells (HBM3.18) | pSport 1 | LP023 |
| HSCP HSCQ | stromal cell clone 2.5 | pSport 1 | LP023 |
| HUXA | Breast Cancer: (4005385 A2) | pSport 1 | LP023 |
| HCOM HCON HCOO HCOP HCOQ | Ovary, Cancer (4004650 A3): Well- | pSport 1 | LP023 |
| | Differentiated Micropapillary Serous | | |
| | Carcinoma | | |
| HBNM | Breast, Cancer: (9802C020E) | pSport 1 | LP023 |
| HVVA HVVB HVVC HVVD HVVE | Human Bone Marrow, treated | pSport 1 | LP023 |

[0847] Two approaches can be used to isolate a particular clone from the deposited sample of plasmid DNAs cited for that clone in Table 5. First, a plasmid is directly isolated by screening the clones using a polynucleotide probe corresponding to the nucleotide sequence of SEQ ID NO:X.

[0848] Particularly, a specific polynucleotide with 30-40 nucleotides is synthesized using an Applied Biosystems DNA synthesizer according to the sequence reported. The oligonucleotide is labeled, for instance, with ³²P-γ-ATP using T4 polynucleotide kinase and purified according to routine methods. (E.g., Maniatis et al., Molecular Cloning: A Laboratory Manual, Cold Spring Harbor Press, Cold Spring, N.Y. (1982).) The plasmid mixture is transformed into a suitable host, as indicated above (such as XL-1 Blue (Stratagene)) using techniques known to those of skill in the art, such as those provided by the vector supplier or in related publications or patents cited above. The transformants are plated on 1.5% agar plates (containing the appropriate selection agent, e.g., ampicillin) to a density of about 150 transformants (colonies) per plate. These plate s are screen ed using Nylon membran es a ccord ing to routine methods for ba cterial colony screening (e.g., Sambrook et al., Molecular Cloning: A Laboratory Manual, 2nd Edit., (1989), Cold Spring Harbor Laboratory Press, pages 1.93 to 1.104), or other techniques known to those of skill in the art.

[0849] Alternatively, two primers of 17-20 nucleotides derived from both ends of the nucleotide sequence of SEQ ID NO:X are synthesized and used to amplify the desired cDNA using the deposited CDNA plasmid as a template. The polymerase chain reaction is carried out under routine conditions, for instance, in 25 μl of reaction mixture with 0.5 ug of the above cDNA template. A convenient reaction mixture is 1.5-5 mM MgCl₂, 0.01% (wlv) gelatin, 20 μM each of dATP, dCTP, dGTP, dTTP, 25 pmol of each primer and 0.25 Unit of Taq polymerase. Thirty five cycles of PCR (denaturation at 94° C. for 1 min; annealing at 55° C. for 1 min; elongation at 72° C. for 1 min) are performed with a Perkin-Elmer Cetus automated thermal cycler. The amplified product is analyzed by agarose gel electrophoresis and the DNA band with expected molecular weight is excised and purified. The PCR product is verified to be the selected sequence by subcloning and sequencing the DNA product.

[0850] Several methods are available for the identification of the 5′ or 3′ non-coding portions of a gene which may not be present in the deposited clone. These methods include but are not limited to, filter probing, clone enrichment using specific probes, and protocols similar or identical to 5′ and 3′ “RACE” protocols which are well known in the art. For instance, a method similar to 5′ RACE is available for generating the missing 5′ end of a desired full-length transcript. (Fromont-Racine et al., Nucleic Acids Res. 21(7):1683-1684 (1993).)

[0851] Briefly, a specific RNA oligonucleotide is ligated to the 5′ ends of a population of RNA presumably containing full-length gene RNA transcripts. A primer set containing a primer specific to the ligated RNA oligonucleotide and a primer specific to a known sequence of the gene of interest is used to PCR amplify the 5′ portion of the desired full-length gene. This amplified product may then be sequenced and used to generate the full length gene.

[0852] This above method starts with total RNA isolated from the desired source, although poly-A+ RNA can be used. The RNA preparation can then be treated with phosphatase if necessary to eliminate 5′ phosphate groups on degraded or damaged RNA which may interfere with the later RNA ligase step. The phosphatase should then be inactivated and the RNA treated with tobacco acid pyrophosphatase in order to remove the cap structure present at the 5′ ends of messenger RNAs. This reaction leaves a 5′ phosphate group at the 5′ end of the cap cleaved RNA which can then be ligated to an RNA oligonucleotide using T4 RNA ligase.

[0853] This modified RNA preparation is used as a template for first strand cDNA synthesis using a gene specific oligonucleotide. The first strand synthesis reaction is used as a template for PCR amplification of the desired 5′ end using a primer specific to the ligated RNA oligonucleotide and a primer specific to the known sequence of the gene of interest. The resultant product is then sequenced and analyzed to confirm that the 5′ end sequence belongs to the desired gene.

### Example 2

[0854] Isolation of Genomic Clones Corresponding to a Polynucleotide

[0855] A human genomic P1 library (Genomic Systems, Inc.) is screened by PCR using primers selected for the sequence corresponding to SEQ ID NO:X, according to the method described in Example 1. (See also, Sambrook.)

### Example 3

[0856] Tissue Specific Expression Analysis

[0857] The Human Genome Sciences, Inc. (HGS) database is derived from sequencing tissue specific cDNA libraries. Libraries generated from a particular tissue are selected and the specific tissue expression pattern of EST groups or assembled contigs within these libraries is determined by comparison of the expression patterns of those groups or contigs within the entire database. ESTs which show tissue specific expression are selected.

[0858] The original clone from which the specific EST sequence was generated, is obtained from the catalogued library of clones and the insert amplified by PCR using methods known in the art. The PCR product is denatured then transferred in 96 well format to a nylon membrane (Schleicher and Scheull) generating an array filter of tissue specific clones. Housekeeping genes, maize genes, and known tissue specific genes are included on the filters. These targets can be used in signal normalization and to validate assay sensitivity. Additional targets are included to monitor probe length and specificity of hybridization.

[0859] Radioactively labeled hybridization probes are generated by first strand cDNA synthesis per the manufacturer's instructions (Life Technologies) from mRNA/RNA samples prepared from the specific tissue being analyzed. The hybridization probes are purified by gel exclusion chromatography, quantitated, and hybridized with the array filters in hybridization bottles at 65° C. overnight. The filters are washed under stringent conditions and signals are captured using a Fuji phosphorimager.

[0860] Data is extracted using AIS software and following background subtraction, signal normalization is performed. This includes a normalization of filter-wide expression levels between different experimental runs. Genes that are differentially expressed in the tissue of interest are identified and the full length sequence of these clones is generated.

### Example 4

[0861] Chromosomal Mapping of the Polynucleotides

[0862] An oligonucleotide primer set is designed according to the sequence at the 5′ end of SEQ ID NO:X. This primer preferably spans about 100 nucleotides. This primer set is then used in a polymerase chain reaction under the following set of conditions: 30 seconds, 95° C.; 1 minute, 56° C.; 1 minute, 70° C. This cycle is repeated 32 times followed by one 5 minute cycle at 70° C. Human, mouse, and hamster DNA is used as template in addition to a somatic cell hybrid panel containing individual chromosomes or chromosome fragments (Bios, Inc). The reactions is analyzed on either 8% polyacrylamide gels or 3.5% agarose gels. Chromosome mapping is determined by the presence of an approximately 100 bp PCR fragment in the particular somatic cell hybrid.

### Example 5

[0863] Bacterial Expression of a Polypeptide

[0864] A polynucleotide encoding a polypeptide of the present invention is amplified using PCR oligonucleotide primers corresponding to the 5′ and 3′ ends of the DNA sequence, as outlined in Example 1, to synthesize insertion fragments. The primers used to amplify the cDNA insert should preferably contain restriction sites, such as BamHI and XbaI, at the 5′ end of the primers in order to clone the amplified product into the expression vector. For example, BamHI and XbaI correspond to the restriction enzyme sites on the bacterial expression vector pQE-9. (Qiagen, Inc., Chatsworth, Calif.). This plasmid vector encodes antibiotic resistance (Ampr), a bacterial origin of replication (ori), an IPTG-regulatable promoter/operator (P/O), a ribosome binding site (RBS), a 6-histidine tag (6-His), and restriction enzyme cloning sites.

[0865] The pQE-9 vector is digested with BamHI and XbaI and the amplified fragment is ligated into the pQE-9 vector maintaining the reading frame initiated at the bacterial RBS. The ligation mixture is then used to transformthe E. coli strain M15/rep4 (Qiagen, Inc.) which contains multiple copies of the plasmid pREP4, which expresses the lacI repressor and also confers kanamycin resistance (Kanr). Transformants are identified by their ability to grow on LB plates and ampicillin/kanamycin resistant colonies are selected. Plasmid DNA is isolated and confirmed by restriction analysis.

[0866] Clones containing the desired constructs are grown overnight (O/N) in liquid culture in LB media supplemented with both Amp (100 ug/ml) and Kan (25 ug/ml). The O/N culture is used to inoculate a large culture at a ratio of 1:100 to 1:250. The cells are grown to an optical density 600 (O.D.⁶⁰⁰) of between 0.4 and 0.6. IPTG (Isopropyl-B-D-thiogalacto pyranoside) is then added to a final concentration of 1 mM. IPTG induces by inactivating the lacI repressor, clearing the P/O leading to increased gene expression.

[0867] Cells are grown for an extra 3 to 4 hours. Cells are then harvested by centrifugation (20 mins at 6000× g). The cell pellet is solubilized in the chaotropic agent 6 Molar Guanidine HCl by stirring for 3-4 hours at 4° C. The cell debris is removed by centrifugation, and the supernatant containing the polypeptide is loaded onto a nickel-nitrilo-tri-acetic acid (“Ni-NTA”) affinity resin column (available from QIAGEN, Inc., supra). Proteins with a 6× His tag bind to the Ni-NTA resin with high affinity and can be purified in a simple one-step procedure (for details see: The QIAexpressionist (1995) QIAGEN, Inc., supra).

[0868] Briefly, the supernatant is loaded onto the column in 6 M guanidine-HCl, pH 8, the column is first washed with 10 volumes of 6 M guanidine-HCl, pH 8, then washed with 10 volumes of 6 M guanidine-HCl pH 6, and finally the polypeptide is eluted with 6 M guanidine-HCl, pH 5.

[0869] The purified protein is then renatured by dialyzing it against phosphate-buffered saline (PBS) or 50 mM Na-acetate, pH 6 buffer plus 200 mM NaCl. Alternatively, the protein can be successfully refolded while immobilized on the Ni-NTA column. The recommended conditions are as follows: renature using a linear 6M-1M urea gradient in 500 mM NaCl, 20% glycerol, 20 mM Tris/HCI pH 7.4, containing protease inhibitors. The renaturation should be performed over a period of 1.5 hours or more. After renaturation the proteins are eluted by the addition of 250 mM immidazole. Immidazole is removed by a final dialyzing step against PBS or 50 mM sodium acetate pH 6 buffer plus 200 mM NaCl. The purified protein is stored at 4° C. or frozen at −80° C.

[0870] In addition to the above expression vector, the present invention further includes an expression vector comprising phage operator and promoter elements operatively linked to a polynucleotide of the present invention, called pHE4a. (ATCC Accession Number 209645, deposited on Feb. 25, 1998.) This vector contains: 1) a neomycinphosphotransferase gene as a selection marker, 2) an E. coli origin of replication, 3) a T5 phage promoter sequence, 4) two lac operator sequences, 5) a Shine-Delgarno sequence, and 6) the lactose operon repressor gene (laclq). The origin of replication (oriC) is derived from pUC19 (LTI, Gaithersburg, Md.). The promoter sequence and operator sequences are made synthetically.

[0871] DNA can be inserted into the pHEa by restricting the vector with NdeI and XbaI, BamHl, XhoI, or Asp718, running the restricted product on a gel, and isolating the larger fragment (the stuffer fragment should be about 310 base pairs). The DNA insert is generated according to the PCR protocol described in Example 1, using PCR primers having restriction sites for NdeI (5′ primer) and XbaI, BamIHI, XhoI, or Asp718 (3′ primer). The PCR insert is gel purified and restricted with compatible enzymes. The insert and vector are ligated according to standard protocols.

[0872] The engineered vector could easily be substituted in the above protocol to express protein in a bacterial system.

### Example 6

[0873] Purification of a Polypeptide from an Inclusion Body

[0874] The following alternative method can be used to purify a polypeptide expressed in E coli when it is present in the form of inclusion bodies. Unless otherwise specified, all of the following steps are conducted at 4-10° C.

[0875] Upon completion of the production phase of the E. coli fermentation, the cell culture is cooled to 4-10° C. and the cells harvested by continuous centrifugation at 15,000 rpm (Heraeus Sepatech). On the basis of the expected yield of protein per unit weight of cell paste and the amount of purified protein required, an appropriate amount of cell paste, by weight, is suspended in a buffer solution containing 100 mM Tris, 50 mM EDTA, pH 7.4. The cells are dispersed to a homogeneous suspension using a high shear mixer.

[0876] The cells are then lysed by passing the solution through a microfluidizer (Microfuidics, Corp. or APV Gaulin, Inc.) twice at 4000-6000 psi. The homogenate is then mixed with NaCl solution to a final concentration of 0.5 M NaCl, followed by centrifugation at 7000× g for 15 min. The resultant pellet is washed again using 0.5M NaCl, 100 mM Tris, 50 mM EDTA, pH 7.4.

[0877] The resulting washed inclusion bodies are solubilized with 1.5 M guanidine hydrochloride (GuHCl) for 2-4 hours. After 7000× g centrifugation for 15 min., the pellet is discarded and the polypeptide containing supernatant is incubated at 4° C. overnight to allow further GuHCl extraction.

[0878] Following high speed centrifugation (30,000× g) to remove insoluble particles, the GuHCl solubilized protein is refolded by quickly mixing the GuHCl extract with 20 volumes of buffer containing 50 mM sodium, pH 4.5, 150 mM NaCl, 2 mM EDTA by vigorous stirring. The refolded diluted protein solution is kept at 4° C. without mixing for 12 hours prior to further purification steps.

[0879] To clarify the refolded polypeptide solution, a previously prepared tangential filtration unit equipped with 0.16 μm membrane filter with appropriate surface area (e.g., Filtron), equilibrated with 40 mM sodium acetate, pH 6.0 is employed. The filtered sample is loaded onto a cation exchange resin (e.g., Poros HS-50, Perseptive Biosystems). The column is washed with 40 mM sodium acetate, pH 6.0 and eluted with 250 mM, 500 mM, 1000 mM, and 1500 mM NaCl in the same buffer, in a stepwise manner. The absorbance at 280 nm of the effluent is continuously monitored. Fractions are collected and further analyzed by SDS-PAGE.

[0880] Fractions containing the polypeptide are then pooled and mixed with 4 volumes of water. The diluted sample is then loaded onto a previously prepared set of tandem columns of strong anion (Poros HQ-50, Perseptive Biosystems) and weak anion (Poros CM-20, Perseptive Biosystems) exchange resins. The columns are equilibrated with 40 mM sodium acetate, pH 6.0. Both columns are washed with 40 mM sodium acetate, pH 6.0, 200 mM NaCl. The CM-20 column is then eluted using a 10 column volume linear gradient ranging from 0.2 M NaCl, 50 mM sodium acetate, pH 6.0 to 1.0 M NaCl, 50 mM sodium acetate, pH 6.5. Fractions are collected under constant A₂₈₀ monitoring of the effluent. Fractions containing the polypeptide (determined, for instance, by 16% SDS-PAGE) are then pooled.

[0881] The resultant polypeptide should exhibit greater than 95% purity after the above refolding and purification steps. No major contaminant bands should be observed from Commassie blue stained 16% SDS-PAGE gel when 5 μg of purified protein is loaded. The purified protein can also be tested for endotoxin/LPS contamination, and typically the LPS content is less than 0.1 ng/ml according to LAL assays.

### Example 7

[0882] Cloning and Expression of a Polypeptide in a Baculovirus Expression System

[0883] In this example, the plasmid shuttle vector pA2 is used to insert a polynucleotide into a baculovirus to express a polypeptide. This expression vector contains the strong polyhedrin promoter of the Autographa califormica nuclear polyhedrosis virus (AcMNPV) followed by convenient restriction sites such as BamHI, Xba I and Asp718. The polyadenylation site of the simian virus 40 (“SV40”) is used for efficient polyadenylation. For easy selection of recombinant virus, the plasmid contains the beta-galactosidase gene from E. coli under control of a weak Drosophila promoter in the same orientation, followed by the polyadenylation signal of the polyhedrin gene. The inserted genes are flanked on both sides by viral sequences for cell-mediated homologous recombination with wild-type viral DNA to generate a viable virus that express the cloned polynucleotide.

[0884] Many other baculovirus vectors can be used in place of the vector above, such as pAc373, pVL941, and pAcIM1, as one skilled in the art would readily appreciate, as long as the construct provides appropriately located signals for transcription, translation, secretion and the like, including a signal peptide and an in-frame AUG as required. Such vectors are described, for instance, in Luckow et al., Virology 170:31-39 (1989).

[0885] Specifically, the cDNA sequence contained in the deposited clone, including the AUG initiation codon, is amplified using the PCR protocol described in Example 1. If a naturally occurring signal sequence is used to produce the polypeptide of the present invention, the pA2 vector does not need a second signal peptide. Alternatively, the vector can be modified (pA2 GP) to include a baculovirus leader sequence, using the standard methods described in Summers et al., “A Manual of Methods for Baculovirus Vectors and Insect Cell Culture Procedures,” Texas Agricultural Experimental Station Bulletin No. 1555 (1987).

[0886] The amplified fragment is isolated from a 1% agarose gel using a commercially available kit (“Geneclean,” BIO 101 Inc., La Jolla, Calif.). The fragment then is digested with appropriate restriction enzymes and again purified on a 1% agarose gel.

[0887] The plasmid is digested with the corresponding restriction enzymes and optionally, can be dephosphorylated using calf intestinal phosphatase, using routine procedures known in the art. The DNA is then isolated from a 1% agarose gel using a commercially available kit (“Geneclean” BIO 101 Inc., La Jolla, Calif.).

[0888] The fragment and the dephosphorylated plasmid are ligated together with T4 DNA ligase. E. coli HB101 or other suitable E. coli hosts such as XL-1 Blue (Stratagene Cloning Systems, La Jolla, Calif.) cells are transformed with the ligation mixture and spread on culture plates. Bacteria containing the plasmid are identified by digesting DNA from individual colonies and analyzing the digestion product by gel electrophoresis. The sequence of the cloned fragment is confirmed by DNA sequencing.

[0889] Five μg of a plasmid containing the polynucleotide is co-transfected with 1.0 μg of a commercially available linearized baculovirus DNA (“BaculoGold™ baculovirus DNA”, Pharmingen, San Diego, Calif.), using the lipofection method described by Felgner et al., Proc. Natl. Acad. Sci. USA 84:7413-7417 (1987). One μg of BaculoGold™ virus DNA and 5 μg of the plasmid are mixed in a sterile well of a microtiter plate containing 50 μl of serum-free Grace's medium (Life Technologies Inc., Gaithersburg, Md.). Afterwards, 10 μl Lipofectin plus 90 μl Grace's medium are added, mixed and incubated for 15 minutes at room temperature. Then the transfection mixture is added drop-wise to Sf9 insect cells (ATCC CRL 1711) seeded in a 35 mm tissue culture plate with 1 ml Grace's medium without serum. The plate is then incubated for 5 hours at 27° C. The transfection solution is then removed from the plate and 1 ml of Grace's insect medium supplemented with 10% fetal calf serum is added. Cultivation is then continued at 27° C. for four days.

[0890] After four days the supernatant is collected and a plaque assay is performed, as described by Summers and Smith, supra. An agarose gel with “Blue Gal” (Life Technologies Inc., Gaithersburg) is used to allow easy identification and isolation of gal-expressing clones, which produce blue-stained plaques. (A detailed description of a “plaque assay” of this type can also be found in the user's guide for insect cell culture and baculovirology distributed by Life Technologies Inc., Gaithersburg, page 9-10.) After appropriate incubation, blue stained plaques are picked with the tip of a micropipettor (e.g., Eppendorf). The agar containing the recombinant viruses is then resuspended in a microcentrifuge tube containing 200 μl of Grace's medium and the suspension containing the recombinant baculovirus is used to infect Sf9 cells seeded in 35 mm dishes. Four days later the supernatants of these culture dishes are harvested and then they are stored at 4° C.

[0891] To verify the expression of the polypeptide, Sf9 cells are grown in Grace's medium supplemented with 10% heat-inactivated FBS. The cells are infected with the recombinant baculovirus containing the polynucleotide at a multiplicity of infection (“MOI”) of about 2. If radiolabeled proteins are desired, 6 hours later the medium is removed and is replaced with SF900 II medium minus methionine and cysteine (available from Life Technologies Inc., Rockville, Md.). After 42 hours, 5 μCi of ³⁵S-methionine and 5 μCi ³⁵S-cysteine (available from Amersham) are added. The cells are further incubated for 16 hours and then are harvested by centrifugation. The proteins in the supernatant as well as the intracellular proteins are analyzed by SDS-PAGE followed by autoradiography (if radiolabeled).

[0892] Microsequencing of the amino acid sequence of the amino terminus of purified protein may be used to determine the amino terminal sequence of the produced protein.

### Example 8

[0893] Expression of a Polypeptide in Mammalian Cells

[0894] The polypeptide of the present invention can be expressed in a mammalian cell. A typical mammalian expression vector contains a promoter element, which mediates the initiation of transcription of mRNA, a protein coding sequence, and signals required for the termination of transcription and polyadenylation of the transcript. Additional elements include enhancers, Kozak sequences and intervening sequences flanked by donor and acceptor sites for RNA splicing. Highly efficient transcription is achieved with the early and late promoters from SV40, the long terminal repeats (LTRs) from Retroviruses, e.g., RSV, HTLVI, HIVI and the early promoter of the cytomegalovirus (CMV). However, cellular elements can also be used (e.g., the human actin promoter).

[0895] Suitable expression vectors for use in practicing the present invention include, for example, vectors such as pSVL and pMSG (Pharmacia, Uppsala, Sweden), pRSVcat (ATCC 37152), pSV2dhfr (ATCC 37146), pBC12MI (ATCC 67109), pCMVSport 2.0, and pCMVSport 3.0. Mammalian host cells that could be used include, human Hela, 293, H9 and Jurkat cells, mouse NIH3T3 and C127 cells, Cos 1, Cos 7 and CV1, quail QC1-3 cells, mouse L cells and Chinese hamster ovary (CHO) cells.

[0896] Alternatively, the polypeptide can be expressed in stable cell lines containing the polynucleotide integrated into a chromosome. The co-transfection with a selectable marker such as DHFR, gpt, neomycin, hygromycin allows the identification and isolation of the transfected cells.

[0897] The transfected gene can also be amplified to express large amounts of the encoded protein. The DHFR (dihydrofolate reductase) marker is useful in developing cell lines that carry several hundred or even several thousand copies of the gene of interest. (See, e.g., Alt, F. W., et al., J. Biol. Chem. 253:1357-1370 (1978); Hamlin, J. L. and Ma, C., Biochem. et Biophys. Acta, 1097:107-143 (1990); Page, M. J. and Sydenham, M. A., Biotechnology 9:64-68 (1991).) Another useful selection marker is the enzyme glutamine synthase (GS) (Murphy et al., Biochem J. 227:277-279 (1991); Bebbington et al., Bio/Technology 10:169-175 (1992). Using these markers, the mammalian cells are grown in selective medium and the cells with the highest resistance are selected. These cell lines contain the amplified gene(s) integrated into a chromosome. Chinese hamster ovary (CHO) and NSO cells are often used for the production of proteins.

[0898] Derivatives of the plasmid pSV2-dhfr (ATCC Accession No. 37146), the expression vectors pC4 (ATCC Accession No. 209646) and pC6 (ATCC Accession No.209647) contain the strong promoter (LTR) of the Rous Sarcoma Virus (Cullen et al., Molecular and Cellular Biology, 438-447 (March, 1985)) plus a fragment of the CMV-enhancer (Boshart et al., Cell 41:521-530 (1985).) Multiple cloning sites, e.g., with the restriction enzyme cleavage sites BamHI, XbaI and Asp718, facilitate the cloning of the gene of interest. The vectors also contain the 3′ intron, the polyadenylation and termination signal of the rat preproinsulin gene, and the mouse DHFR gene under control of the SV40 early promoter.

[0899] Specifically, the plasmid pC6, for example, is digested with appropriate restriction enzymes and then dephosphorylated using calf intestinal phosphates by procedures known in the art. The vector is then isolated from a 1% agarose gel.

[0900] A polynucleotide of the present invention is amplified according to the protocol outlined in Example 1. If a naturally occurring signal sequence is used to produce the polypeptide of the present invention, the vector does not need a second signal peptide. Alternatively, if a naturally occurring signal sequence is not used, the vector can be modified to include a heterologous signal sequence. (See, e.g., WO 96/34891.)

[0901] The amplified fragment is isolated from a 1% agarose gel using a commercially available kit (“Geneclean,” BIO 101 Inc., La Jolla, Calif.). The fragment then is digested with appropriate restriction enzymes and again purified on a 1% agarose gel.

[0902] The amplified fragment is then digested with the same restriction enzyme and purified on a 1% agarose gel. The isolated fragment and the dephosphorylated vector are then ligated with T4 DNA ligase. E. coli HB101 or XL-1 Blue cells are then transformed and bacteria are identified that contain the fragment inserted into plasmid pC6 using, for instance, restriction enzyme analysis.

[0903] Chinese hamster ovary cells lacking an active DHFR gene is used for transfection. Five μg of the expression plasmid pC6 or pC4 is cotransfected with 0.5 μg of the plasmid pSVneo using lipofectin (Felgner et al., supra). The plasmid pSV2-neo contains a dominant selectable marker, the neo gene from Tn5 encoding an enzyme that confers resistance to a group of antibiotics including G418. The cells are seeded in alpha minus MEM supplemented with 1 mg/ml G418. After 2 days, the cells are trypsinized and seeded in hybridoma cloning plates (Greiner, Germany) in alpha minus MEM supplemented with 10, 25, or 50 ng/ml of metothrexate plus 1 mg/ml G418. After about 10-14 days single clones are trypsinized and then seeded in 6-well petri dishes or 10 ml flasks using different concentrations of methotrexate (50 nM, 100 nM, 200 nM, 400 nM, 800 nM). Clones growing at the highest concentrations of methotrexate are then transferred to new 6-well plates containing even higher concentrations of methotrexate (1 μM, 2 μM, 5 μM, 10 mM, 20 mM). The same procedure is repeated until clones are obtained which grow at a concentration of 100-200 μM. Expression of the desired gene product is analyzed, for instance, by SDS-PAGE and Western blot or by reversed phase HPLC analysis.

### Example 9

[0904] Protein Fusions

[0905] The polypeptides of the present invention are preferably fused to other proteins. These fusion proteins can be used for a variety of applications. For example, fusion of the present polypeptides to His-tag, HA-tag, protein A, IgG domains, and maltose binding protein facilitates purification. (See Example 5; see also EP A 394,827; Traunecker, et al., Nature 331:84-86 (1988).) Similarly, fusion to IgG-1, IgG-3, and albumin increases the halflife time in vivo. Nuclear localization signals fused to the polypeptides of the present invention can target the protein to a specific subcellular localization, while covalent heterodimer or homodimers can increase or decrease the activity of a fusion protein. Fusion proteins can also create chimeric molecules having more than one function. Finally, fusion proteins can increase solubility and/or stability of the fused protein compared to the non-fused protein. All of the types of fusion proteins described above can be made by modifying the following protocol, which outlines the fusion of a polypeptide to an IgG molecule, or the protocol described in Example 5.

[0906] Briefly, the human Fc portion of the IgG molecule can be PCR amplified, using primers that span the 5′ and 3′ ends of the sequence described below. These primers also should have convenient restriction enzyme sites that will facilitate cloning into an expression vector, preferably a mammalian expression vector.

[0907] For example, if pC4 (Accession No. 209646) is used, the human Fc portion can be ligated into the BamHI cloning site. Note that the 3′ BamHI site should be destroyed. Next, the vector containing the human Fc portion is re-restricted with BamHI, linearizing the vector, and a polynucleotide of the present invention, isolated by the PCR protocol described in Example 1, is ligated into this BamHI site. Note that the polynucleotide is cloned without a stop codon, otherwise a fusion protein will not be produced.

[0908] If the naturally occurring signal sequence is used to produce the polypeptide of the present invention, pC4 does not need a second signal peptide. Alternatively, if the naturally occurring signal sequence is not used, the vector can be modified to include a heterologous signal sequence. (See, e.g., WO 96/34891.)

| | |
|---|---|
| Human IgG Fc region: | |
| GGGATCCGGAGCCCAAATCTTCTGACAAAACTCACACATGCCCACCGTGCCCA | (SEQ ID NO:1547) |
| GCACCTGAATTCGAGGGTGCACCGTCAGTCTTCCTCTTCCCCCCAAAACCCAA | |
| GGACACCCTCATGATCTCCCGGACTCCTGAGGTCACATGCGTGGTGGTGGACG | |
| TAAGCCACGAAGACCCTGAGGTCAAGTTCAACTGGTACGTGGACGGCGTGGA | |
| GGTGCATAATGCCAAGACAAAGCCGCGGGAGGAGCAGTACAACAGCACGTAC | |
| CGTGTGGTCAGCGTCCTCACCGTCCTGCACCAGGACTGGCTGAATGGCAAGGA | |
| GTACAAGTGCAAGGTCTCCAACAAAGCCCTCCCAACCCCCATCGAGAAAACC | |
| ATCTCCAAAGCCAAAGGGCAGCCCCGAGAACCACAGGTGTACACCCTGCCCC | |
| CATCCCGGGATGAGCTGACCAAGAACCAGGTCAGCCTGACCTGCCTGGTCAA | |
| AGGCTTCTATCCAAGCGACATCGCCGTGGAGTGGGAGAGCAATGGGCAGCCG | |
| GAGAACAACTACAAGACCACGCCTCCCGTGCTGGACTCCGACGGCTCCTTCTT | |
| CCTCTACAGCAAGCTCACCGTGGACAAGAGCAGGTGGCAGCAGGGGAACGTC | |
| TTCTCATGCTCCGTGATGCATGAGGCTCTGCACAACCACTACACGCAGAAGAG | |
| CCTCTCCCTGTCTCCGGGTAAATGAGTGCGACGGCCGCGACTCTAGAGGAT | |

### Example 10

[0909] Production of an Antibody from a Polypeptide

[0910] a) Hybridoma Technology

[0911] The antibodies of the present invention can be prepared by a variety of methods. (See, Current Protocols, Chapter 2.) As one example of such methods, cells expressing polypeptide of the present invention are administered to an animal to induce the production of sera containing polyclonal antibodies. In a preferred method, a preparation of polypeptide of the present invention is prepared and purified to render it substantially free of natural contaminants. Such a preparation is then introduced into an animal in order to produce polyclonal antisera of greater specific activity.

[0912] Monoclonal antibodies specific for polypeptide of the present invention are prepared using hybridoma technology. (Kohler et al., Nature 256:495 (1975); Kohler et al., Eur. J. Immunol. 6:511 (1976); Kohler et al., Eur. J. Immlunol. 6:292 (1976); Hammerling et al., in: Monoclonal Antibodies and T-Cell Hybridomas, Elsevier, N.Y., pp. 563-681 (1981)). In general, an animal (preferably a mouse) is immunized with polypeptide of the present invention or, more preferably, with a secreted polypeptide of the present invention-expressing cell. Such polypeptide-expressing cells are cultured in any suitable tissue culture medium, preferably in Earle's modified Eagle's medium supplemented with 10% fetal bovine serum (inactivated at about 56° C.), and supplemented with about 10 g/l of nonessential amino acids, about 1,000 U/ml of penicillin, and about 100 μg/ml of streptomycin.

[0913] The splenocytes of such mice are extracted and fused with a suitable myeloma cell line. Any suitable myeloma cell line may be employed in accordance with the present invention; however, it is preferable to employ the parent myeloma cell line (SP20), available from the ATCC. After fusion, the resulting hybridoma cells are selectively maintained in HAT medium, and then cloned by limiting dilution as described by Wands et al. (Gastroenterology 80:225-232 (1981)). The hybridoma cells obtained through such a selection are then assayed to identify clones which secrete antibodies capable of binding the polypeptide of the present invention.

[0914] Alternatively, additional antibodies capable of binding to polypeptide of the present invention can be produced in a two-step procedure using anti-idiotypic antibodies. Such a method makes use of the fact that antibodies are themselves antigens, and therefore, it is possible to obtain an antibody which binds to a second antibody. In accordance with this method, protein specific antibodies are used to immunize an animal, preferably a mouse. The splenocytes of such an animal are then used to produce hybridoma cells, and the hybridoma cells are screened to identify clones which produce an antibody whose ability to bind to the polypeptide of the present invention-specific antibody can be blocked by polypeptide of the present invention. Such antibodies comprise anti-idiotypic antibodies to the polypeptide of the present invention-specific antibody and are used to immunize an animal to induce formation of further polypeptide of the present invention-specific antibodies.

[0915] For in vivo use of antibodies in humans, an antibody is “humanized”. Such antibodies can be produced using genetic constructs derived from hybridoma cells producing the monoclonal antibodies described above. Methods for producing chimeric and humanized antibodies are known in the art and are discussed herein. (See, for review, Morrison, Science 229:1202 (1985); Oi et al., BioTechniques 4:214 (1986); Cabilly et al., U.S. Pat. No. 4,816,567; Taniguchi et al., EP 171496; Morrison et al., EP 173494; Neuberger et al., WO 8601533; Robinson et al., WO 8702671; Boulianne et al., Nature 312:643 (1984); Neuberger et al., Nature 314:268 (1985).)

[0916] b) Isolation Of Antibody Fragments Directed Against Polypeptide of the Present Invention From A Library Of scFvs

[0917] Naturally occurring V-genes isolated from human PBLs are constructed into a library of antibody fragments which contain reactivities against polypeptide of the present invention to which the donor may or may not have been exposed (see e.g., U.S. Pat. No. 5,885,793 incorporated herein by reference in its entirety).

[0918] Rescue of the Library. A library of scFvs is constructed from the RNA of human PBLs as described in PCT publication WO 92/01047. To rescue phage displaying antibody fragments, approximately 109 E. coli harboring the phagemid are used to inoculate 50 ml of 2×TY containing 1% glucose and 100 μg/ml of ampicillin (2×TY-AMP-GLU) and grown to an O.D. of 0.8 with shaking. Five ml of this culture is used to innoculate 50 ml of 2xTY-AMP-GLU, 2×108 TU of delta gene 3 helper (M13 delta gene III, see PCT publication WO 92/01047) are added and the culture incubated at 37° C. for 45 minutes without shaking and then at 37° C. for 45 minutes with shaking. The culture is centrifuged at 4000 r.p.m. for 10 min. and the pellet resuspended in 2 liters of 2×TY containing 100 μg/ml ampicillin and 50 ug/ml kanamycin and grown overnight. Phage are prepared as described in PCT publication WO 92/01047.

[0919] M13 delta gene II is prepared as follows: M13 delta gene III helper phage does not encode gene III protein, hence the phage(mid) displaying antibody fragments have a greater avidity of binding to antigen. Infectious M13 delta gene III particles are made by growing the helper phage in cells harboring a pUC19 derivative supplying the wild type gene III protein during phage morphogenesis. The culture is incubated for I hour at 37° C. without shaking and then for a further hour at 37° C. with shaking. Cells are spun down (IEC-Centra 8,400 r.p.m. for 10 min), resuspended in 300 ml 2×TY broth containing 100 μg ampicillin/ml and 25 μg kanamycin/ml (2×TY-AMP-KAN) and grown overnight, shaking at 37° C. Phage particles are purified and concentrated from the culture medium by two PEG-precipitations (Sambrook et al., 1990), resuspended in 2 ml PBS and passed through a 0.45 μm filter (Minisart NML; Sartorius) to give a final concentration of approximately 1013 transducing units/ml (ampicillin-resistant clones).

[0920] Panning of the Library. Immunotubes (Nunc) are coated overnight in PBS with 4 ml of either 100 μg/ml or 10 μg/ml of a polypeptide of the present invention. Tubes are blocked with 2% Marvel-PBS for 2 hours at 37° C. and then washed 3 times in PBS. Approximately 1013 TU of phage is applied to the tube and incubated for 30 minutes at room temperature tumbling on an over and under turntable and then left to stand for another 1.5 hours. Tubes are washed 10 times with PBS 0.1% Tween-20 and 10 times with PBS. Phage are eluted by adding 1 ml of 100 mM triethylamine and rotating 15 minutes on an under and over turntable after which the solution is immediately neutralized with 0.5 ml of 1.0M Tris-HCI, pH 7.4. Phage are then used to infect 10 ml of mid-log E. coli TG1 by incubating eluted phage with bacteria for 30 minutes at 37° C. The E. coli are then plated on TYE plates containing 1% glucose and 100 μg/ml ampicillin. The resulting bacterial library is then rescued with delta gene 3 helper phage as described above to prepare phage for a subsequent round of selection. This process is then repeated for a total of 4 rounds of affinity purification with tube-washing increased to 20 times with PBS, 0.1% Tween-20 and 20 times with PBS for rounds 3 and 4.

[0921] Characterization of Binders. Eluted phage from the 3rd and 4th rounds of selection are used to infect E. coli HB 2151 and soluble scFv is produced (Marks, et al., 1991) from single colonies for assay. ELISAs are performed with microtitre plates coated with either 10 pg/ml of the polypeptide of the present invention in 50 mM bicarbonate pH 9.6. Clones positive in ELISA are further characterized by PCR fingerprinting (see, e.g., PCT publication WO 92/01047) and then by sequencing. These ELISA positive clones may also be further characterized by techniques known in the art, such as, for example, epitope mapping, binding affinity, receptor signal transduction, ability to block or competitively inhibit antibody/antigen binding, and competitive agonistic or antagonistic activity.

### Example 11

[0922] Method of Determining Alterations in a Gene Corresponding to a Polynucleotide

[0923] RNA isolated from entire families or individual patients presenting with a phenotype of interest (such as a disease) is be isolated. cDNA is then generated from these RNA samples using protocols known in the art. (See, Sambrook.) The cDNA is then used as a template for PCR, employing primers surrounding regions of interest in SEQ ID NO:X; and/or the nucleotide sequence of the related CDNA in the cDNA clone contained in a deposited library. Suggested PCR conditions consist of 35 cycles at 95 degrees C for 30 seconds; 60-120 seconds at 52-58 degrees C; and 60-120 seconds at 70 degrees C, using buffer solutions described in Sidransky et al., Science 252:706 (1991).

[0924] PCR products are then sequenced using primers labeled at their 5′ end with T4 polynucleotide kinase, employing SequiTherm Polymerase. (Epicentre Technologies). The intron-exon borders of selected exons is also determined and genomic PCR products analyzed to confirm the results. PCR products harboring suspected mutations is then cloned and sequenced to validate the results of the direct sequencing.

[0925] PCR products is cloned into T-tailed vectors as described in Holton et al., Nucleic Acids Research, 19:1156 (1991) and sequenced with T7 polymerase (United States Biochemical). Affected individuals are identified by mutations not present in unaffected individuals.

[0926] Genomic rearrangements are also observed as a method of determining alterations in a gene corresponding to a polynucleotide. Genomic clones isolated according to Example 2 are nick-translated with digoxigenindeoxy-uridine 5′- triphosphate (Boehringer Manheim), and FISH performed as described in Johnson et al., Methods Cell Biol. 35:73-99 (1991). Hybridization with the labeled probe is carried out using a vast excess of human cot-1 DNA for specific hybridization to the corresponding genomic locus.

[0927] Chromosomes are counterstained with 4,6-diamino-2-phenylidole and propidium iodide, producing a combination of C- and R-bands. Aligned images for precise mapping are obtained using a triple-band filter set (Chroma Technology, Brattleboro, Vt.) in combination with a cooled charge-coupled device camera (Photometrics, Tucson, Ariz.) and variable excitation wavelength filters. (Johnson et al., Genet. Anal. Tech. Appl., 8:75 (1991).) Image collection, analysis and chromosomal fractional length measurements are performed using the ISee Graphical Program System. (Inovision Corporation, Durham, N.C.) Chromosome alterations of the genomic region hybridized by the probe are identified as insertions, deletions, and translocations. These alterations are used as a diagnostic marker for an associated disease.

### Example 12

[0928] Method of Detecting Abnormal Levels of a Polypeptide in a Biological Sample

[0929] A polypeptide of the present invention can be detected in a biological sample, and if an increased or decreased level of the polypeptide is detected, this polypeptide is a marker for a particular phenotype. Methods of detection are numerous, and thus, it is understood that one skilled in the art can modify the following assay to fit their particular needs.

[0930] For example, antibody-sandwich ELISAs are used to detect polypeptides in a sample, preferably a biological sample. Wells of a microtiter plate are coated with specific antibodies, at a final concentration of 0.2 to 10 ug/ml. The antibodies are either monoclonal or polyclonal and are produced by the method described in Example 10. The wells are blocked so that non-specific binding of the polypeptide to the well is reduced.

[0931] The coated wells are then incubated for >2 hours at RT with a sample containing the polypeptide. Preferably, serial dilutions of the sample should be used to validate results. The plates are then washed three times with deionized or distilled water to remove unbounded polypeptide.

[0932] Next, 50 ul of specific antibody-alkaline phosphatase conjugate, at a concentration of 25-400 ng, is added and incubated for 2 hours at room temperature. The plates are again washed three times with deionized or distilled water to remove unbounded conjugate.

[0933] Add 75 ul of 4-methylumbelliferyl phosphate (MUP) or p-nitrophenyl phosphate (NPP) substrate solution to each well and incubate 1 hour at room temperature. Measure the reaction by a microtiter plate reader. Prepare a standard curve, using serial dilutions of a control sample, and plot polypeptide concentration on the X-axis (log scale) and fluorescence or absorbance of the Y-axis (linear scale). Interpolate the concentration of the polypeptide in the sample using the standard curve.

### Example 13

[0934] Formulation

[0935] The invention also provides methods of treatment and/or prevention of diseases or disorders (such as, for example, any one or more of the diseases or disorders disclosed herein) by administration to a subject of an effective amount of a Therapeutic. By therapeutic is meant a polynucleotides or polypeptides of the invention (including fragments and variants), agonists or antagonists thereof, and/or antibodies thereto, in combination with a pharmaceutically acceptable carrier type (e.g., a sterile carrier).

[0936] The Therapeutic will be formulated and dosed in a fashion consistent with good medical practice, taking into account the clinical condition of the individual patient (especially the side effects of treatment with the Therapeutic alone), the site of delivery, the method of administration, the scheduling of administration, and other factors known to practitioners. The “effective amount” for purposes herein is thus determined by such considerations.

[0937] As a general proposition, the total pharmaceutically effective amount of the Therapeutic administered parenterally per dose will be in the range of about lug/kg/day to 10 mg/kg/day of patient body weight, although, as noted above, this will be subject to therapeutic discretion. More preferably, this dose is at least 0.01 mg/kg/day, and most preferably for humans between about 0.01 and 1 mg/kg/day for the hormone. If given continuously, the Therapeutic is typically administered at a dose rate of about 1 ug/kg/hour to about 50 ug/kg/hour, either by 1-4 injections per day or by continuous subcutaneous infusions, for example, using a mini-pump. An intravenous bag solution may also be employed. The length of treatment needed to observe changes and the interval following treatment for responses to occur appears to vary depending on the desired effect.

[0938] Therapeutics can be are administered orally, rectally, parenterally, intracistemally, intravaginally, intraperitoneally, topically (as by powders, ointments, gels, drops or transdermal patch), bucally, or as an oral or nasal spray. “Pharmaceutically acceptable carrier” refers to a non-toxic solid, semisolid or liquid filler, diluent, encapsulating material or formulation auxiliary of any. The term “parenteral” as used herein refers to modes of administration which include intravenous, intramuscular, intraperitoneal, intrasternal, subcutaneous and intraarticular injection and infusion.

[0939] Therapeutics of the invention are also suitably administered by sustained-release systems. Suitable examples of sustained-release Therapeutics are administered orally, rectally, parenterally, intracistemally, intravaginally, intraperitoneally, topically (as by powders, ointments, gels, drops or transdermal patch), bucally, or as an oral or nasal spray. “Pharmaceutically acceptable carrier” refers to a non-toxic solid, semisolid or liquid filler, diluent, encapsulating material or formulation auxiliary of any type. The term “parenteral” as used herein refers to modes of administration which include intravenous, intramuscular, intraperitoneal, intrastemal, subcutaneous and intraarticular injection and infusion.

[0940] Therapeutics of the invention are also suitably administered by sustained-release systems. Suitable examples of sustained-release Therapeutics include suitable polymeric materials (such as, for example, semi-permeable polymer matrices in the form of shaped articles, e.g., films, or mirocapsules), suitable hydrophobic materials (for example as an emulsion in an acceptable oil) or ion exchange resins, and sparingly soluble derivatives (such as, for example, a sparingly soluble salt).

[0941] Sustained-release matrices include polylactides (U.S. Pat. No. 3,773,919, EP 58,481), copolymers of L-glutamic acid and gamma-ethyl-L-glutamate (Sidman et al., Biopolymers 22:547-556 (1983)), poly (2- hydroxyethyl methacrylate) (Langer et al., J. Biomed. Mater. Res. 15:167-277 (1981), and Langer, Chem. Tech. 12:98-105 (1982)), ethylene vinyl acetate (Langer et al., Id.) or poly-D-(−)-3-hydroxybutyric acid (EP 133,988).

[0942] Sustained-release Therapeutics also include liposomally entrapped Therapeutics of the invention (see generally, Langer, Science 249:1527-1533 (1990); Treat et al., in Liposomes in the Therapy of Infectious Disease and Cancer, Lopez-Berestein and Fidler (eds.), Liss, New York, pp. 317-327 and 353-365 (1989)). Liposomes containing the Therapeutic are prepared by methods known per se: DE 3,218,121; Epstein et al., Proc. Natl. Acad. Sci. (USA) 82:3688-3692 (1985); Hwang et al., Proc. Natl. Acad. Sci.(USA) 77:4030-4034 (1980); EP 52,322; EP 36,676; EP 88,046; EP 143,949; EP 142,641; Japanese Pat. Appl. 83-118008; U.S. Pat. Nos. 4,485,045 and 4,544,545; and EP 102,324. Ordinarily, the liposomes are of the small (about 200-800 Angstroms) unilamellar type in which the lipid content is greater than about 30 mol. percent cholesterol, the selected proportion being adjusted for the optimal Therapeutic.

[0943] In yet an additional embodiment, the Therapeutics of the invention are delivered by way of a pump (see Langer, supra; Sefton, CRC Crit. Ref. Biomed. Eng. 14:201 (1987); Buchwald et al., Surgery 88:507 (1980); Saudek et al., N. Engi. J. Med. 321:574 (1989)).

[0944] Other controlled release systems are discussed in the review by Langer (Science 249:1527-1533 (1990)).

[0945] For parenteral administration, in one embodiment, the Therapeutic is formulated generally by mixing it at the desired degree of purity, in a unit dosage injectable form (solution, suspension, or emulsion), with a pharmaceutically acceptable carrier, i.e., one that is non-toxic to recipients at the dosages and concentrations employed and is compatible with other ingredients of the formulation. For example, the formulation preferably does not include oxidizing agents and other compounds that are known to be deleterious to the Therapeutic.

[0946] Generally, the formulations are prepared by contacting the Therapeutic uniformly and intimately with liquid carriers or finely divided solid carriers or both. Then, if necessary, the product is shaped into the desired formulation. Preferably the carrier is a parenteral carrier, more preferably a solution that is isotonic with the blood of the recipient. Examples of such carrier vehicles include water, saline, Ringer's solution, and dextrose solution. Non-aqueous vehicles such as fixed oils and ethyl oleate are also useful herein, as well as liposomes.

[0947] The carrier suitably contains minor amounts of additives such as substances that enhance isotonicity and chemical stability. Such materials are non-toxic to recipients at the dosages and concentrations employed, and include buffers such as phosphate, citrate, succinate, acetic acid, and other organic acids or their salts; antioxidants such as ascorbic acid; low molecular weight (less than about ten residues) polypeptides, e.g., polyarginine or tripeptides; proteins, such as serum albumin, gelatin, or immunoglobulins; hydrophilic polymers such as polyvinylpyrrolidone; amino acids, such as glycine, glutamic acid, aspartic acid, or arginine; monosaccharides, disaccharides, and other carbohydrates including cellulose or its derivatives, glucose, manose, or dextrins; chelating agents such as EDTA; sugar alcohols such as mannitol or sorbitol; counterions such as sodium; and/or nonionic surfactants such as polysorbates, poloxamers, or PEG.

[0948] The Therapeutic is typically formulated in such vehicles at a concentration of about 0.1 mg/ml to 100 mg/nil, preferably 1-10 mg/ml, at a pH of about 3 to 8. It will be understood that the use of certain of the foregoing excipients, carriers, or stabilizers will result in the formation of polypeptide salts.

[0949] Any pharmaceutical used for therapeutic administration can be sterile. Sterility is readily accomplished by filtration through sterile filtration membranes (e.g., 0.2 micron membranes). Therapeutics generally are placed into a container having a sterile access port, for example, an intravenous solution bag or vial having a stopper pierceable by a hypodermic injection needle.

[0950] Therapeutics ordinarily will be stored in unit or multi-dose containers, for example, sealed ampoules or vials, as an aqueous solution or as a lyophilized formulation for reconstitution. As an example of a lyophilized formulation, 10-ml vials are filled with 5 ml of sterile-filtered 1% (w/v) aqueous Therapeutic solution, and the resulting mixture is lyophilized. The infusion solution is prepared by reconstituting the lyophilized Therapeutic using bacteriostatic Water-for-Injection.

[0951] The invention also provides a pharmaceutical pack or kit comprising one or more containers filled with one or more of the ingredients of the Therapeutics of the invention. Associated with such container(s) can be a notice in the form prescribed by a governmental agency regulating the manufacture, use or sale of pharmaceuticals or biological products, which notice reflects approval by the agency of manufacture, use or sale for human administration. In addition, the Therapeutics may be employed in conjunction with other therapeutic compounds.

[0952] The Therapeutics of the invention may be administered alone or in combination with adjuvants. Adjuvants that may be administered with the Therapeutics of the invention include, but are not limited to, alum, alum plus deoxycholate (ImmunoAg), MTP-PE (Biocine Corp.), QS21 (Genentech, Inc.), BCG, and MPL. In a specific embodiment, Therapeutics of the invention are administered in combination with alum. In another specific embodiment, Therapeutics of the invention are administered in combination with QS-21. Further adjuvants that may be administered with the Therapeutics of the invention include, but are not limited to, Monophosphoryl lipid immunomodulator, AdjuVax 100a, QS-21, QS-18, CRL1005, Aluminum salts, MF-59, and Virosomal adjuvant technology. Vaccines that may be administered with the Therapeutics of the invention include, but are not limited to, vaccines directed toward protection against MMR (measles, mumps, rubella), polio, varicella, tetanus/diptheria, hepatitis A, hepatitis B, haemophilus influenzae B, whooping cough, pneumonia, influenza, Lyme's Disease, rotavirus, cholera, yellow fever, Japanese encephalitis, poliomyelitis, rabies, typhoid fever, and pertussis. Combinations may be administered either concomitantly, e.g., as an admixture, separately but simultaneously or concurrently; or sequentially. This includes presentations in which the combined agents are administered together as a therapeutic mixture, and also procedures in which the combined agents are administered separately but simultaneously, e.g., as through separate intravenous lines into the same individual. Administration “in combination” further includes the separate administration of one of the compounds or agents given first, followed by the second.

[0953] The Therapeutics of the invention may be administered alone or in combination with other therapeutic agents. Therapeutic agents that may be administered in combination with the Therapeutics of the invention, include but not limited to, other members of the TNF family, chemotherapeutic agents, antibiotics, steroidal and non-steroidal anti-inflammatories, conventional immunotherapeutic agents, cytokines and/or growth factors. Combinations may be administered either concomitantly, e.g., as an admixture, separately but simultaneously or concurrently; or sequentially. This includes presentations in which the combined agents are administered together as a therapeutic mixture, and also procedures in which the combined agents are administered separately but simultaneously, e.g., as through separate intravenous lines into the same individual. Administration “in combination” further includes the separate administration of one of the compounds or agents given first, followed by the second.

[0954] In one embodiment, the Therapeutics of the invention are administered in combination with members of the TNF family. TNF, TNF-related or TNF4ike molecules that may be administered with the Therapeutics of the invention include, but are not limited to, soluble forms of TNF-alpha, lymphotoxin-alpha (LT-alpha, also known as TNF-beta), LT-beta (found in complex heterotrimer LT-alpha2-beta), OPGL, FasL, CD27L, CD30L, CD40L, 4-1BBL, DcR3, OX40L, TNF-gamma (International Publication No. WO 96/14328), AIM-I (International Publication No. WO 97/33899), endokine-alpha (International Publication No. WO 98/07880), TR6 (International Publication No. WO 98/30694), OPG, and neutrokine-alpha (International Publication No. WO 98/18921, OX40, and nerve growth factor (NGF), and soluble forms of Fas, CD30, CD27, CD40 and 4-IBB, TR2 (International Publication No. WO 96/34095), DR3 (International Publication No. WO 97/33904), DR4 (International Publication No. WO 98/32856), TR5 (International Publication No. WO 98/30693), TR6 (International Publication No. WO 98/30694), TR7 (International Publication No. WO 98/41629), TRANK, TR9 (International Publication No. WO 98/56892),TR10 (International Publication No. WO 98/54202), 312C2 (International Publication No. WO 98/06842), and TR12, and soluble forms CD 154, CD70, and CD153.

[0955] In certain embodiments, Therapeutics of the invention are administered in combination with antiretroviral agents, nucleoside reverse transcriptase inhibitors, non-nucleoside reverse transcriptase inhibitors, and/or protease inhibitors. Nucleoside reverse transcriptase inhibitors that may be administered in combination with the Therapeutics of the invention, include, but are not limited to, RETROVIR™ (zidovudine/AZT), VIDEX™ (didanosine/ddl), HIVID™ (zalcitabine/ddC), ZERIT™ (stavudine/d4T), EPIVIR™ (lamivudine/3TC), and COMBIVIR™ (zidovudine/lamivudine). Non-nucleoside reverse transcriptase inhibitors that may be administered in combination with the Therapeutics of the invention, include, but are not limited to, VIRAMUNE™ (nevirapine), RESCRIPTOR™ (delavirdine), and SUSTIVA™ (efavirenz). Protease inhibitors that may be administered in combination with the Therapeutics of the invention, include, but are not limited to, CRIXIVAN™ (indinavir), NORVIR™ (ritonavir), INVIRASE™ (saquinavir), and VIRACEPT™ (nelfinavir). In a specific embodiment, antiretroviral agents, nucleoside reverse transcriptase inhibitors, non-nucleoside reverse transcriptase inhibitors, and/or protease inhibitors may be used in any combination with Therapeutics of the invention to treat AIDS and/or to prevent or treat HIV infection.

[0956] In other embodiments, Therapeutics of the invention may be administered in combination with anti-opportunistic infection agents. Anti-opportunistic agents that may be administered in combination with the Therapeutics of the invention, include, but are not limited to, TRMETHOPRIM-SULFAMETHOXAZOLE™, DAPSONE™, PENTAMIDINE™, ATOVAQUONE™, ISONIAZID™, RIFAMPIN™, PYRAZINAMIDE™, ETHAMBUTOL™, RIFABUTIN™, CLARITHROMYCIN™, AZITHROMYCIN™, GANCICLOVIR™, FOSCARNET™, CIDOFOVIR™, FLUCONAZOLE™, ITRACONAZOLE™, KETOCONAZOLE™, ACYCLOVIR™, FAMCICOLVIR™, PYRIMETHAMINE™, LEUCOVORIN™, NEUPOGEN™ (filgrastim/G-CSF), and LEUKINE™ (sargramostim/GM-CSF). In a specific embodiment, Therapeutics of the invention are used in any combination with TRIMETHOPRIM-SULFAMETHOXAZOLE™, DAPSONE™, PENTAMIDINE™, and/or ATOVAQUONE™ to prophylactically treat or prevent an opportunistic Pneumocystis carinii pneumonia infection. In another specific embodiment, Therapeutics of the invention are used in any combination with ISONIAZID™, RIFAMPIN™, PYRAZINAMIDE™, and/or ETHAMBUTOL™ to prophylactically treat or prevent an opportunistic Mycobacterium avium complex infection. In another specific embodiment, Therapeutics of the invention are used in any combination with RIFABUTIN™, CLARITHROMYCIN™, and/or AZITHROMYCIN™ to prophylactically treat or prevent an opportunistic Mycobacterium tuberculosis infection. In another specific embodiment, Therapeutics of the invention are used in any combination with GANCICLOVIR™, FOSCARNET™, and/or CIDOFOVIR™ to prophylactically treat or prevent an opportunistic cytomegalovirus infection. In another specific embodiment, Therapeutics of the invention are used in any combination with FLUCONAZOLE™, ITRACONAZOLE™, and/or KETOCONAZOLE™ to prophylactically treat or prevent an opportunistic fungal infection. In another specific embodiment, Therapeutics of the invention are used in any combination with ACYCLOVIR™ and/or FAMCICOLVIR™ to prophylactically treat or prevent an opportunistic herpes simplex virus type I and/or type II infection. In another specific embodiment, Therapeutics of the invention are used in any combination with PYRIMETHAMINE™ and/or LEUCOVORIN™ to prophylactically treat or prevent an opportunistic Toxoplasma gondii infection. In another specific embodiment, Therapeutics of the invention are used in any combination with LEUCOVORIN™ and/or NEUPOGEN™ to prophylactically treat or prevent an opportunistic bacterial infection.

[0957] In a further embodiment, the Therapeutics of the invention are administered in combination with an antiviral agent. Antiviral agents that may be administered with the Therapeutics of the invention include, but are not limited to, acyclovir, ribavirin, amantadine, and remantidine.

[0958] In a further embodiment, the Therapeutics of the invention are administered in combination with an antibiotic agent. Antibiotic agents that may be administered with the Therapeutics of the invention include, but are not limited to, amoxicillin, beta-lactamases, aminoglycosides, beta-lactam (glycopeptide), beta-lactamases, Clindamycin, chloramphenicol, cephalosporins, ciprofloxacin, ciprofloxacin, erythromycin, fluoroquinolones, macrolides, metronidazole, penicillins, quinolones, rifampin, streptomycin, sulfonamide, tetracyclines, trimethoprim, trimethoprim-sulfamthoxazole, and vancomycin.

[0959] Conventional nonspecific immunosuppressive agents, that may be administered in combination with the Therapeutics of the invention include, but are not limited to, steroids, cyclosporine, cyclosporine analogs, cyclophosphamide methylprednisone, prednisone, azathioprine, FK-506, 15-deoxyspergualin, and other immunosuppressive agents that act by suppressing the function of responding T cells.

[0960] In specific embodiments, Therapeutics of the invention are administered in combination with immunosuppressants. Immunosuppressants preparations that may be administered with the Therapeutics of the invention include, but are not limited to, ORTHOCLONE™ (OKT3), SANDIMMUNE™/NEORAL™/SANGDYA™ (cyclosporin), PROGRAF™ (tacrolimus), CELLCEPT™ (mycophenolate), Azathioprine, glucorticosteroids, and RAPAMUNE™ (sirolimus). In a specific embodiment, immunosuppressants may be used to prevent rejection of organ or bone marrow transplantation.

[0961] In an additional embodiment, Therapeutics of the invention are administered alone or in combination with one or more intravenous immune globulin preparations. Intravenous immune globulin preparations that may be administered with the Therapeutics of the invention include, but not limited to, GAMMAR™, IVEEGAM™, SANDOGLOBULIN™, GAMMAGARD S/D™, and GAMIMUNE™. In a specific embodiment, Therapeutics of the invention are administered in combination with intravenous immune globulin preparations in transplantation therapy (e.g., bone marrow transplant).

[0962] In an additional embodiment, the Therapeutics of the invention are administered alone or in combination with an anti-inflammatory agent. Anti-inflammatory agents that may be administered with the Therapeutics of the invention include, but are not limited to, glucocorticoids and the nonsteroidal anti-inflammatories, aminoarylcarboxylic acid derivatives, arylacetic acid derivatives, arylbutyric acid derivatives, arylcarboxylic acids, arylpropionic acid derivatives, pyrazoles, pyrazolones, salicylic acid derivatives, thiazinecarboxamides, e-acetamidocaproic acid, S-adenosylmethionine, 3-amino-4-hydroxybutyric acid, amixetrine, bendazac, benzydamine, bucolome, difenpiramide, ditazol, emorfazone, guaiazulene, nabumetone, nimesulide, orgotein, oxaceprol, paranyline, perisoxal, pifoxime, proquazone, proxazole, and tenidap.

[0963] In another embodiment, compostions of the invention are administered in combination with a chemotherapeutic agent. Chemotherapeutic agents that may be administered with the Therapeutics of the invention include, but are not limited to, antibiotic derivatives (e.g., doxorubicin, bleomycin, daunorubicin, and dactinomycin); antiestrogens (e.g., tamoxifen); antimetabolites (e.g., fluorouracil, 5-FU, methotrexate, floxuridine, interferon alpha-2b, glutamic acid, plicamycin, mercaptopurine, and 6-thioguanine); cytotoxic agents (e.g., carmustine, BCNU, lomustine, CCNU, cytosine arabinoside, cyclophosphamide, estramustine, hydroxyurea, procarbazine, mitomycin, busulfan, cis-platin, and vincristine sulfate); hormones (e.g., medroxyprogesterone, estramustine phosphate sodium, ethinyl estradiol, estradiol, megestrol acetate, methyltestosterone, diethylstilbestrol diphosphate, chlorotrianisene, and testolactone); nitrogen mustard derivatives (e.g., mephalen, chorambucil, mechlorethamine (nitrogen mustard) and thiotepa); steroids and combinations (e.g., bethamethasone sodium phosphate); and others (e.g., dicarbazine, asparaginase, mitotane, vincristine sulfate, vinblastine sulfate, and etoposide).

[0964] In a specific embodiment, Therapeutics of the invention are administered in combination with CHOP (cyclophosphamide, doxorubicin, vincristine, and prednisone) or any combination of the components of CHOP. In another embodiment, Therapeutics of the invention are administered in combination with Rituximab. In a further embodiment, Therapeutics of the invention are administered with Rituxmab arid CHOP, or Rituxmab and any combination of the components of CHOP.

[0965] In an additional embodiment, the Therapeutics of the invention are administered in combination with cytokines. Cytokines that may be administered with the Therapeutics of the invention include, but are not limited to, IL2, IL3, IL4, IL5, IL6, IL7, IL10, IL12, IL13, IL15, anti-CD40, CD40L, IFN-gamma and TNF-alpha. In another embodiment, Therapeutics of the invention may be administered with any interleukin, including, but not limited to, IL-lalpha, IL-lbeta, IL-2, IL-3, IL-4, IL-5, IL-6, IL-7, IL-8, IL-9, IL-10, IL-11, IL-12, IL-13, IL-14, IL-15, IL-16, IL-17, IL-18, IL-19, IL-20, and IL-21.

[0966] In an additional embodiment, the Therapeutics of the invention are administered in combination with angiogenic proteins. Angiogenic proteins that may be administered with the Therapeutics of the invention include, but are not limited to, Glioma Derived Growth Factor (GDGF), as disclosed in European Patent Number EP-399816; Platelet Derived Growth Factor-A (PDGF-A), as disclosed in European Patent Number EP-6821 10; Platelet Derived Growth Factor-B (PDGF-B), as disclosed in European Patent Number EP-282317; Placental Growth Factor (PIGF), as disclosed in International Publication Number WO 92/06194; Placental Growth Factor-2 (PIGF-2), as disclosed in Hauser et al., Gorwth Factors, 4:259-268 (1993); Vascular Endothelial Growth Factor (VEGF), as disclosed in International Publication Number WO 90/13649; Vascular Endothelial Growth Factor-A (VEGF-A), as disclosed in European Patent Number EP-506477; Vascular Endothelial Growth Factor-2 (VEGF-2), as disclosed in International Publication Number WO 96/39515; Vascular Endothelial Growth Factor B (VEGF-3); Vascular Endothelial Growth Factor B-186 (VEGF-B186), as disclosed in International Publication Number WO 96/26736; Vascular Endothelial Growth Factor-D (VEGF-D), as disclosed in International Publication Number WO 98/02543; Vascular Endothelial Growth Factor-D (VEGF-D), as disclosed in International Publication Number WO 98/07832; and Vascular Endothelial Growth Factor-E (VEGF-E), as disclosed in German Patent Number DE19639601. The above mentioned references are incorporated herein by reference herein.

[0967] In an additional embodiment, the Therapeutics of the invention are administered in combination with hematopoietic growth factors. Hematopoietic growth factors that may be administered with the Therapeutics of the invention include, but are not limited to, LEUKINE™ (SARGRAMOSTIM™) and NEUPOGEN™ (FILGRASTIM™).

[0968] In an additional embodiment, the Therapeutics of the invention are administered in combination with Fibroblast Growth Factors. Fibroblast Growth Factors that may be administered with the Therapeutics of the invention include, but are not limited to, FGF-1, FGF-2, FGF-3, FGF-4, FGF-5, FGF-6, FGF-7, FGF-8, FGF-9, FGF-10, FGF-11, FGF-12, FGF-13, FGF-14, and FGF-15.

[0969] In additional embodiments, the Therapeutics of the invention are administered in combination with other therapeutic or prophylactic regimens, such as, for example, radiation therapy.

### Example 14

[0970] Method of Treating Decreased Levels of the Polypeptide

[0971] The present invention relates to a method for treating an individual in need of an increased level of a polypeptide of the invention in the body comprising administering to such an individual a composition comprising a therapeutically effective amount of an agonist of the invention (including polypeptides of the invention). Moreover, it will be appreciated that conditions caused by a decrease in the standard or normal expression level of a polypeptide of the present invention in an individual can be treated by administering the agonist or antagonist of the present invention. Thus, the invention also provides a method of treatment of an individual in need of an increased level of the polypeptide comprising administering to such an individual a Therapeutic comprising an amount of the agonist or antagonist to increase the activity level of the polypeptide in such an individual.

[0972] For example, a patient with decreased levels of a polypeptide receives a daily dose 0.1-100 ug/kg of the agonist or antagonist for six consecutive days. The exact details of the dosing scheme, based on administration and formulation, are provided in Example 13.

### Example 15

[0973] Method of Treating Increased Levels of the Polypeptide

[0974] The present invention also relates to a method of treating an individual in need of a decreased level of a polypeptide of the invention in the body comprising administering to such an individual a composition comprising a therapeutically effective amount of an antagonist of the invention (including polypeptides and antibodies of the invention).

[0975] In one example, antisense technology is used to inhibit production of a polypeptide of the present invention. This technology is one example of a method of decreasing levels of a polypeptide, due to a variety of etiologies, such as cancer.

[0976] For example, a patient diagnosed with abnormally increased levels of a polypeptide is administered intravenously antisense polynucleotides at 0.5, 1.0, 1.5, 2.0 and 3.0 mg/kg day for 21 days. This treatment is repeated after a 7-day rest period if the treatment was well tolerated. The formulation of the antisense polynucleotide is provided in Example 13.

### Example 16

[0977] Method of Treatment Using Gene Therapy-Ex Vivo

[0978] One method of gene therapy transplants fibroblasts, which are capable of expressing a polypeptide, onto a patient. Generally, fibroblasts are obtained from a subject by skin biopsy. The resulting tissue is placed in tissue-culture medium and separated into small pieces. Small chunks of the tissue are placed on a wet surface of a tissue culture flask, approximately ten pieces are placed in each flask. The flask is turned upside down, closed tight and left at room temperature over night. After 24 hours at room temperature, the flask is inverted and the chunks of tissue remain fixed to the bottom of the flask and fresh media (e.g., Ham's F12 media, with 10% FBS, penicillin and streptomycin) is added. The flasks are then incubated at 37 degree C for approximately one week.

[0979] At this time, fresh media is added and subsequently changed every several days. After an additional two weeks in culture, a monolayer of fibroblasts emerge. The monolayer is trypsinized and scaled into larger flasks.

[0980] pMV-7 (Kirschmeier, P.T. et al., DNA, 7:219-25 (1988)), flanked by the long terminal repeats of the Moloney murine sarcoma virus, is digested with EcoRI and HindIII and subsequently treated with calf intestinal phosphatase. The linear vector is fractionated on agarose gel and purified, using glass beads.

[0981] The cDNA encoding a polypeptide of the present invention can be amplified using PCR primers which correspond to the 5′ and 3′ end sequences respectively as set forth in Example 1 using primers and having appropriate restriction sites and initiation/stop codons, if necessary. Preferably, the 5′ primer contains an EcoRI site and the 3′ primer includes a Hindlil site. Equal quantities of the Moloney murine sarcoma virus linear backbone and the amplified EcoRI and HindIII fragment are added together, in the presence of T4 DNA ligase. The resulting mixture is maintained under conditions appropriate for ligation of the two fragments. The ligation mixture is then used to transform bacteria HB101, which are then plated onto agar containing kanamycin for the purpose of confirming that the vector has the gene of interest properly inserted.

[0982] The amphotropic pA317 or GP+am12 packaging cells are grown in tissue culture to confluent density in Dulbecco's Modified Eagles Medium (DMEM) with 10% calf serum (CS), penicillin and streptomycin. The MSV vector containing the gene is then added to the media and the packaging cells transduced with the vector. The packaging cells now produce infectious viral particles containing the gene (the packaging cells are now referred to as producer cells).

[0983] Fresh media is added to the transduced producer cells, and subsequently, the media is harvested from a 10 cm plate of confluent producer cells. The spent media, containing the infectious viral particles, is filtered through a millipore filter to remove detached producer cells and this media is then used to infect fibroblast cells. Media is removed from a sub-confluent plate of fibroblasts and quickly replaced with the media from the producer cells. This media is removed and replaced with fresh media. If the titer of virus is high, then virtually all fibroblasts will be infected and no selection is required. If the titer is very low, then it is necessary to use a retroviral vector that has a selectable marker, such as neo or his. Once the fibroblasts have been efficiently infected, the fibroblasts are analyzed to determine whether protein is produced.

[0984] The engineered fibroblasts are then transplanted onto the host, either alone or after having been grown to confluence on cytodex 3 microcarrier beads.

### Example 17

[0985] Gene Therapy Using Endogenous Genes Corresponding To Polynucleotides of the Invention

[0986] Another method of gene therapy according to the present invention involves operably associating the endogenous polynucleotide sequence of the invention with a promoter via homologous recombination as described, for example, in U.S. Pat. No. 5,641,670, issued Jun. 24, 1997; International Publication NO: WO 96/29411, published Sep. 26, 1996; International Publication NO: WO 94/12650, published Aug. 4, 1994; Koller et al., Proc. Natl. Acad. Sci. USA, 86:8932-8935 (1989); and Zijlstra et al., Nature, 342:435-438 (1989). This method involves the activation of a gene which is present in the target cells, but which is not expressed in the cells, or is expressed at a lower level than desired.

[0987] Polynucleotide constructs are made which contain a promoter and targeting sequences, which are homologous to the 5′ non-coding sequence of endogenous polynucleotide sequence, flanking the promoter. The targeting sequence will be sufficiently near the 5′ end of the polynucleotide sequence so the promoter will be operably linked to the endogenous sequence upon homologous recombination. The promoter and the targeting sequences can be amplified using PCR. Preferably, the amplified promoter contains distinct restriction enzyme sites on the 5′ and 3′ ends. Preferably, the 3′ end of the first targeting sequence contains the same restriction enzyme site as the 5′ end of the amplified promoter and the 5′ end of the second targeting sequence contains the same restriction site as the 3′ end of the amplified promoter.

[0988] The amplified promoter and the amplified targeting sequences are digested with the appropriate restriction enzymes and subsequently treated with calf intestinal phosphatase. The digested promoter and digested targeting sequences are added together in the presence of T4 DNA ligase. The resulting mixture is maintained under conditions appropriate for ligation of the two fragments. The construct is size fractionated on an agarose gel then purified by phenol extraction and ethanol precipitation.

[0989] In this Example, the polynucleotide constructs are administered as naked polynucleotides via electroporation. However, the polynucleotide constructs may also be administered with transfection-facilitating agents, such as liposomes, viral sequences, viral particles, precipitating agents, etc. Such methods of delivery are known in the art.

[0990] Once the cells are transfected, homologous recombination will take place which results in the promoter being operably linked to the endogenous polynucleotide sequence. This results in the expression of polynucleotide corresponding to the polynucleotide in the cell. Expression may be detected by immunological staining, or any other method known in the art.

[0991] Fibroblasts are obtained from a subject by skin biopsy. The resulting tissue is placed in DMEM+10% fetal calf serum. Exponentially growing or early stationary phase fibroblasts are trypsinized and rinsed from the plastic surface with nutrient medium. An aliquot of the cell suspension is removed for counting, and the remaining cells are subjected to centrifugation. The supernatant is aspirated and the pellet is resuspended in 5 ml of electroporation buffer (20 mM HEPES pH 7.3, 137 mM NaCI, 5 mM KCl, 0.7 mM Na₂ HPO₄, 6 mM dextrose). The cells are recentrifuged, the supernatant aspirated, and the cells resuspended in electroporation buffer containing 1 mg/ml acetylated bovine serum albumin. The final cell suspension contains approximately 3×10⁶ cells/ml. Electroporation should be performed immediately following resuspension.

[0992] Plasmid DNA is prepared according to standard techniques. For example, to construct a plasmid for targeting to the locus corresponding to the polynucleotide of the invention, plasmid pUC18 (MBI Fermentas, Amherst, N.Y.) is digested with HindIII. The CMV promoter is amplified by PCR with an Xbal site on the 5′ end and a BamIII site on the 3′end. Two non-coding sequences are amplified via PCR: one non-coding sequence (fragment 1) is amplified with a HindIII site at the 5′ end and an Xba site at the 3′end; the other non-coding sequence (fragment 2) is amplified with a BamHI site at the 5′end and a HindIII site at the 3′end. The CMV promoter and the fragments (1 and 2) are digested with the appropriate enzymes (CMV promoter—XbaI and BamHI; fragment 1- Xbal; fragment 2—BamHI) and ligated together. The resulting ligation product is digested with HindIII, and ligated with the HindIII-digested pUC18 plasmid.

[0993] Plasmid DNA is added to a sterile cuvette with a 0.4 cm electrode gap (Bio-Rad). The final DNA concentration is generally at least 120 μg/ml. 0.5 ml of the cell suspension (containing approximately 1.5.×10⁶ cells) is then added to the cuvette, and the cell suspension and DNA solutions are gently mixed. Electroporation is performed with a Gene-Pulser apparatus (Bio-Rad). Capacitance and voltage are set at 960 μF and 250-300 V, respectively. As voltage increases, cell survival decreases, but the percentage of surviving cells that stably incorporate the introduced DNA into their genome increases dramatically. Given these parameters, a pulse time of approximately 14-20 mSec should be observed.

[0994] Electroporated cells are maintained at room temperature for approximately 5 min, and the contents of the cuvette are then gently removed with a sterile transfer pipette. The cells are added directly to 10 ml of prewarmed nutrient media (DMEM with 15% calf serum) in a 10 cm dish and incubated at 37 degree C. The following day, the media is aspirated and replaced with 10 ml of fresh media and incubated for a further 16-24 hours.

[0995] The engineered fibroblasts are then injected into the host, either alone or after having been grown to confluence on cytodex 3 microcarrier beads. The fibroblasts now produce the protein product. The fibroblasts can then be introduced into a patient as described above.

### Example 18

[0996] Method of Treatment Using Gene Therapy—In Vivo

[0997] Another aspect of the present invention is using in vivo gene therapy methods to treat disorders, diseases and conditions. The gene therapy method relates to the introduction of naked nucleic acid (DNA, RNA, and antisense DNA or RNA) sequences into an animal to increase or decrease the expression of the polypeptide. The polynucleotide of the present invention may be operatively linked to a promoter or any other genetic elements necessary for the expression of the polypeptide by the target tissue. Such gene therapy and delivery techniques and methods are known in the art, see, for example, WO90/11092, WO98/11779; U.S. Pat. No. 5,693,622, 5,705,151, 5,580,859; Tabata et al., Cardiovasc. Res. 35(3):470-479 (1997); Chao et al., Pharmacol. Res. 35(6):517-522 (1997); Wolff, Neuromuscul. Disord. 7(5):314-318 (1997); Schwartz et al., Gene Ther. 3(5):405-411 (1996); Tsurumi et al., Circulation 94(12):3281-3290 (1996) (incorporated herein by reference).

[0998] The polynucleotide constructs may be delivered by any method that delivers injectable materials to the cells of an animal, such as, injection into the interstitial space of tissues (heart, muscle, skin, lung, liver, intestine and the like). The polynucleotide constructs can be delivered in a pharmaceutically acceptable liquid or aqueous carrier.

[0999] The term “naked” polynucleotide, DNA or RNA, refers to sequences that are free from any delivery vehicle that acts to assist, promote, or facilitate entry into the cell, including viral sequences, viral particles, liposome formulations, lipofectin or precipitating agents and the like. However, the polynucleotides of the present invention may also be delivered in liposome formulations (such as those taught in Felgner P.L. et al. (1995) Ann. NY Acad. Sci. 772:126-139 and Abdallah B. et al. (1995) Biol. Cell 85(l):1-7) which can be prepared by methods well known to those skilled in the art.

[1000] The polynucleotide vector constructs used in the gene therapy method are preferably constructs that will not integrate into the host genome nor will they contain sequences that allow for replication. Any strong promoter known to those skilled in the art can be used for driving the expression of DNA. Unlike other gene therapies techniques, one major advantage of introducing naked nucleic acid sequences into target cells is the transitory nature of the polynucleotide synthesis in the cells. Studies have shown that non-replicating DNA sequences can be introduced into cells to provide production of the desired polypeptide for periods of up to six months.

[1001] The polynucleotide construct can be delivered to the interstitial space of tissues within the an animal, including of muscle, skin, brain, lung, liver, spleen, bone marrow, thymus, heart, lymph, blood, bone, cartilage, pancreas, kidney, gall bladder, stomach, intestine, testis, ovary, uterus, rectum, nervous system, eye, gland, and connective tissue. Interstitial space of the tissues comprises the intercellular fluid, mucopolysaccharide matrix among the reticular fibers of organ tissues, elastic fibers in the walls of vessels or chambers, collagen fibers of fibrous tissues, or that same matrix within connective tissue ensheathing muscle cells or in the lacunae of bone. It is similarly the space occupied by the plasma of the circulation and the lymph fluid of the lymphatic channels. Delivery to the interstitial space of muscle tissue is preferred for the reasons discussed below. They may be conveniently delivered by injection into the tissues comprising these cells. They are preferably delivered to and expressed in persistent, non-dividing cells which are differentiated, although delivery and expression may be achieved in non-differentiated or less completely differentiated cells, such as, for example, stem cells of blood or skin fibroblasts. In vivo muscle cells are particularly competent in their ability to take up and express polynucleotides.

[1002] For the naked polynucleotide injection, an effective dosage amount of DNA or RNA will be in the range of from about 0.05 g/kg body weight to about 50 mg/kg body weight. Preferably the dosage will be from about 0.005 mg/kg to about 20 mg/kg and more preferably from about 0.05 mg/kg to about 5 mg/kg. Of course, as the artisan of ordinary skill will appreciate, this dosage will vary according to the tissue site of injection. The appropriate and effective dosage of nucleic acid sequence can readily be determined by those of ordinary skill in the art and may depend on the condition being treated and the route of administration. The preferred route of administration is by the parenteral route of injection into the interstitial space of tissues. However, other parenteral routes may also be used, such as, inhalation of an aerosol formulation particularly for delivery to lungs or bronchial tissues, throat or mucous membranes of the nose. In addition, naked polynucleotide constructs can be delivered to arteries during angioplasty by the catheter used in the procedure.

[1003] The dose response effects of injected polynucleotide in muscle in vivo is determined as follows. Suitable template DNA for production of MRNA coding for polypeptide of the present invention is prepared in accordance with a standard recombinant DNA methodology. The template DNA, which may be either circular or linear, is either used as naked DNA or complexed with liposomes. The quadriceps muscles of mice are then injected with various amounts of the template DNA.

[1004] Five to six week old female and male Balb/C mice are anesthetized by intraperitoneal injection with 0.3 ml of 2.5% Avertin. A 1.5 cm incision is made on the anterior thigh, and the quadriceps muscle is directly visualized. The template DNA is injected in 0.1 ml of carrier in a 1 cc syringe through a 27 gauge needle over one minute, approximately 0.5 cm from the distal insertion site of the muscle into the knee and about 0.2 cm deep. A suture is placed over the injection site for future localization, and the skin is closed with stainless steel clips.

[1005] After an appropriate incubation time (e.g., 7 days) muscle extracts are prepared by excising the entire quadriceps. Every fifth 15 um cross-section of the individual quadriceps muscles is histochemically stained for protein expression. A time course for protein expression may be done in a similar fashion except that quadriceps from different mice are harvested at different times. Persistence of DNA in muscle following injection may be determined by Southern blot analysis after preparing total cellular DNA and HIRT supernatants from injected and control mice. The results of the above experimentation in mice can be use to extrapolate proper dosages and other treatment parameters in humans and other animals using naked DNA.

### Example 19

[1006] Transgenic Animals

[1007] The polypeptides of the invention can also be expressed in transgenic animals. Animals of any species, including, but not limited to, mice, rats, rabbits, hamsters, guinea pigs, pigs, micro-pigs, goats, sheep, cows and non-human primates, e.g., baboons, monkeys, and chimpanzees may be used to generate transgenic animals. In a specific embodiment, techniques described herein or otherwise known in the art, are used to express polypeptides of the invention in humans, as part of a gene therapy protocol.

[1008] Any technique known in the art may be used to introduce the transgene (i.e., polynucleotides of the invention) into animals to produce the founder lines of transgenic animals. Such techniques include, but are not limited to, pronuclear microinjection (Paterson et al., Appl. Microbiol. Biotechnol. 40:691-698 (1994); Carver et al., Biotechnology (NY) 11:1263-1270 (1993); Wright et al., Biotechnology (NY) 9:830-834 (1991); and Hoppe et al., U.S. Pat. No. 4,873,191 (1989)); retrovirus mediated gene transfer into germ lines (Van der Putten et al., Proc. Natl. Acad. Sci., USA 82:6148-6152 (1985)), blastocysts or embryos; gene targeting in embryonic stem cells (Thompson et al., Cell 56:313-321 (1989)); electroporation of cells or embryos (Lo, 1983, Mol Cell. Biol. 3:1803-1814 (1983)); introduction of the polynucleotides of the invention using a gene gun (see, e.g., Ulmer et al., Science 259:1745 (1993); introducing nucleic acid constructs into embryonic pleuripotent stem cells and transferring the stem cells back into the blastocyst; and sperm-mediated gene transfer (Lavitrano et al., Cell 57:717-723 (1989); etc. For a review of such techniques, see Gordon, “Transgenic Animals,” Intl. Rev. Cytol. 115:171-229 (1989), which is incorporated by reference herein in its entirety.

[1009] Any technique known in the art may be used to produce transgenic clones containing polynucleotides of the invention, for example, nuclear transfer into enucleated oocytes of nuclei from cultured embryonic, fetal, or adult cells induced to quiescence (Campell et al., Nature 380:64-66 (1996); Wilmut et al., Nature 385:810-813 (1997)).

[1010] The present invention provides for transgenic animals that carry the transgene in all their cells, as well as animals which carry the transgene in some, but not all their cells, i.e., mosaic animals or chimeric. The transgene may be integrated as a single transgene or as multiple copies such as in concatamers, e.g., head-to-head tandems or head-to-tail tandems. The transgene may also be selectively introduced into and activated in a particular cell type by following, for example, the teaching of Lasko et al. (Lasko et al., Proc. Natl. Acad. Sci. USA 89:6232-6236 (1992)). The regulatory sequences required for such a cell-type specific activation will depend upon the particular cell type of interest, and will be apparent to those of skill in the art. When it is desired that the polynucleotide transgene be integrated into the chromosomal site of the endogenous gene, gene targeting is preferred. Briefly, when such a technique is to be utilized, vectors containing some nucleotide sequences homologous to the endogenous gene are designed for the purpose of integrating, via homologous recombination with chromosomal sequences, into and disrupting the function of the nucleotide sequence of the endogenous gene. The transgene may also be selectively introduced into a particular cell type, thus inactivating the endogenous gene in only that cell type, by following, for example, the teaching of Gu et al. (Gu et al., Science 265:103-106 (1994)). The regulatory sequences required for such a cell-type specific inactivation will depend upon the particular cell type of interest, and will be apparent to those of skill in the art.

[1011] Once transgenic animals have been generated, the expression of the recombinant gene may be assayed utilizing standard techniques. Initial screening may be accomplished by Southern blot analysis or PCR techniques to analyze animal tissues to verify that integration of the transgene has taken place. The level of mRNA expression of the transgene in the tissues of the transgenic animals may also be assessed using techniques which include, but are not limited to, Northern blot analysis of tissue samples obtained from the animal, in situ hybridization analysis, and reverse transcriptase-PCR (rt-PCR). Samples of transgenic gene-expressing tissue may also be evaluated immunocytochemically or immunohistochemically using antibodies specific for the transgene product.

[1012] Once the founder animals are produced, they may be bred, inbred, outbred, or crossbred to produce colonies of the particular animal. Examples of such breeding strategies include, but are not limited to: outbreeding of founder animals with more than one integration site in order to establish separate lines; inbreeding of separate lines in order to produce compound transgenics that express the transgene at higher levels because of the effects of additive expression of each transgene; crossing of heterozygous transgenic animals to produce animals homozygous for a given integration site in order to both augment expression and eliminate the need for screening of animals by DNA analysis; crossing of separate homozygous lines to produce compound heterozygous or homozygous lines; and breeding to place the transgene on a distinct background that is appropriate for an experimental model of interest.

[1013] Transgenic animals of the invention have uses which include, but are not limited to, animal model systems useful in elaborating the biological function of polypeptides of the present invention, studying conditions and/or disorders associated with aberrant expression, and in screening for compounds effective in ameliorating such conditions and/or disorders.

### Example 20

[1014] Knock-Out Animals

[1015] Endogenous gene expression can also be reduced by inactivating or “knocking out” the gene and/or its promoter using targeted homologous recombination. (E.g., see Smithies et al., Nature 317:230-234 (1985); Thomas & Capecchi, Cell 51:503-512 (1987); Thompson et al., Cell 5:313-321 (1989); each of which is incorporated by reference herein in its entirety). For example, a mutant, non-functional polynucleotide of the invention (or a completely unrelated DNA sequence) flanked by DNA homologous to the endogenous polynucleotide sequence (either the coding regions or regulatory regions of the gene) can be used, with or without a selectable marker and/or a negative selectable marker, to transfect cells that express polypeptides of the invention in vivo. In another embodiment, techniques known in the art are used to generate knockouts in cells that contain, but do not express the gene of interest. Insertion of the DNA construct, via targeted homologous recombination, results in inactivation of the targeted gene. Such approaches are particularly suited in research and agricultural fields where modifications to embryonic stem cells can be used to generate animal offspring with an inactive targeted gene (e.g., see Thomas & Capecchi 1987 and Thompson 1989, supra). However this approach can be routinely adapted for use in humans provided the recombinant DNA constructs are directly administered or targeted to the required site in vivo using appropriate viral vectors that will be apparent to those of skill in the art.

[1016] In further embodiments of the invention, cells that are genetically engineered to express the polypeptides of the invention, or alternatively, that are genetically engineered not to express the polypeptides of the invention (e.g., knockouts) are administered to a patient in vivo. Such cells may be obtained from the patient (i.e., animal, including human) or an MHC compatible donor and can include, but are not limited to fibroblasts, bone marrow cells, blood cells (e.g., lymphocytes), adipocytes, muscle cells, endothelial cells etc. The cells are genetically engineered in vitro using recombinant DNA techniques to introduce the coding sequence of polypeptides of the invention into the cells, or alternatively, to disrupt the coding sequence and/or endogenous regulatory sequence associated with the polypeptides of the invention, e.g., by transduction (using viral vectors, and preferably vectors that integrate the transgene into the cell genome) or transfection procedures, including, but not limited to, the use of plasmids, cosmids, YACs, naked DNA, electroporation, liposomes, etc. The coding sequence of the polypeptides of the invention can be placed under the control of a strong constitutive or inducible promoter or promoter/enhancer to achieve expression, and preferably secretion, of the polypeptides of the invention. The engineered cells which express and preferably secrete the polypeptides of the invention can be introduced into the patient systemically, e.g., in the circulation, or intraperitoneally.

[1017] Alternatively, the cells can be incorporated into a matrix and implanted in the body, e.g., genetically engineered fibroblasts can be implanted as part of a skin graft; genetically engineered endothelial cells can be implanted as part of a lymphatic or vascular graft. (See, for example, Anderson et al. U.S. Pat. No. 5,399,349; and Mulligan & Wilson, U.S. Pat. No. 5,460,959 each of which is incorporated by reference herein in its entirety).

[1018] When the cells to be administered are non-autologous or non-MHC compatible cells, they can be administered using well known techniques which prevent the development of a host immune response against the introduced cells. For example, the cells may be introduced in an encapsulated form which, while allowing for an exchange of components with the immediate extracellular environment, does not allow the introduced cells to be recognized by the host immune system.

[1019] Transgenic and “knock-out” animals of the invention have uses which include, but are not limited to, animal model systems useful in elaborating the biological function of polypeptides of the present invention, studying conditions and/or disorders associated with aberrant expression, and in screening for compounds effective in ameliorating such conditions and/or disorders.

### Example 21

[1020] Assays Detecting Stimulation or Inhibition of B cell Proliferation and Differentiation

[1021] Generation of functional humoral immune responses requires both soluble and cognate signaling between B-lineage cells and their microenvironment. Signals may impart a positive stimulus that allows a B-lineage cell to continue its programmed development, or a negative stimulus that instructs the cell to arrest its current developmental pathway. To date, numerous stimulatory and inhibitory signals have been found to influence B cell responsiveness including IL-2, IL-4, IL-5, IL-6, IL-7, IL10, IL-13, IL-14 and IL-15. Interestingly, these signals are by themselves weak effectors but can, in combination with various co-stimulatory proteins, induce activation, proliferation, differentiation, homing, tolerance and death among B cell populations.

[1022] One of the best studied classes of B-cell co-stimulatory proteins is the TNF-superfamily. Within this family CD40, CD27, and CD30 along with their respective ligands CD154, CD70, and CD153 have been found to regulate a variety of immune responses. Assays which allow for the detection and/or observation of the proliferation and differentiation of these B-cell populations and their precursors are valuable tools in determining the effects various proteins may have on these B-cell populations in terms of proliferation and differentiation. Listed below are two assays designed to allow for the detection of the differentiation, proliferation, or inhibition of B-cell populations and their precursors.

[1023] In Vitro Assay

[1024] Agonists or antagonists of the invention can be assessed for its ability to induce activation, proliferation, differentiation or inhibition and/or death in B-cell populations and their precursors. The activity of the agonists or antagonists of the invention on purified human tonsillar B cells, measured qualitatively over the dose range from 0.1 to 10,000 ng/mL, is assessed in a standard B-lymphocyte co-stimulation assay in which purified tonsillar B cells are cultured in the presence of either formalin-fixed Staphylococcus aureus Cowan I (SAC) or immobilized anti-human IgM antibody as the priming agent. Second signals such as IL-2 and IL-15 synergize with SAC and IgM crosslinking to elicit B cell proliferation as measured by tritiated-thymidine incorporation. Novel synergizing agents can be readily identified using this assay. The assay involves isolating human tonsillar B cells by magnetic bead (MACS) depletion of CD3-positive cells. The resulting cell population is greater than 95% B cells as assessed by expression of CD45R(B220).

[1025] Various dilutions of each sample are placed into individual wells of a 96-well plate to which are added 10⁵ B-cells suspended in culture medium (RPMI 1640 containing 10% FBS, 5×10⁻⁵M 2ME, 100U/ml penicillin, lOug/ml streptomycin, and 10⁻⁵ dilution of SAC) in a total volume of 150 ul. Proliferation or inhibition is quantitated by a 20 h pulse (luCi/well) with 3H-thymidine (6.7 Ci/mM) beginning 72 h post factor addition. The positive and negative controls are IL2 and medium respectively.

[1026] In Vivo Assay

[1027] BALB/c mice are injected (i.p.) twice per day with buffer only, or 2 mg/Kg of agonists or antagonists of the invention, or truncated forms thereof. Mice receive this treatment for 4 consecutive days, at which time they are sacrificed and various tissues and serum collected for analyses. Comparison of H&E sections from normal spleens and spleens treated with agonists or antagonists of the invention identify the results of the activity of the agonists or antagonists on spleen cells, such as the diffusion of peri-arterial lymphatic sheaths, and/or significant increases in the nucleated cellularity of the red pulp regions, which may indicate the activation of the differentiation and proliferation of B-cell populations. Immunohistochemical studies using a B cell marker, anti-CD45R(B220), are used to determine whether any physiological changes to splenic cells, such as splenic disorganization, are due to increased B-cell representation within loosely defined B-cell zones that infiltrate established T-cell regions.

[1028] Flow cytometric analyses of the spleens from mice treated with agonist or antagonist is used to indicate whether the agonists or antagonists specifically increases the proportion of ThB+, CD45R(B220)dull B cells over that which is observed in control nice. Likewise, a predicted consequence of increased mature B-cell representation in vivo is a relative increase in serum Ig titers. Accordingly, serum IgM and IgA levels are compared between buffer and agonists or antagonists-treated mice.

[1029] The studies described in this example tested activity of agonists or antagonists of the invention. However, one skilled in the art could easily modify the exemplified studies to test the activity of polynucleotides or polypeptides of the invention (e.g., gene therapy).

### Example 22

[1030] T Cell Proliferation Assay

[1031] A CD3-induced proliferation assay is performed on PBMCs and is measured by the uptake of ³H-thymidine. The assay is performed as follows. Ninety-six well plates are coated with 100 μl/well of mAb to CD3 (HIT3a, Phanningen) or isotype-matched control mAb (B33.1) overnight at 4 degrees C (1 μg/ml in 0.05M bicarbonate buffer, pH 9.5), then washed three times with PBS. PBMC are isolated by F/H gradient centrifugation from human peripheral blood and added to quadruplicate wells (5×10⁴/well) of mAb coated plates in RPMI containing 10% FCS and P/S in the presence of varying concentrations of agonists or antagonists of the invention (total volume 200 ul). Relevant protein buffer and medium alone are controls. After 48 hr. culture at 37 degrees C, plates are spun for 2 min. at 1000 rpm and 100 μl of supernatant is removed and stored −20 degrees C for measurement of IL-2 (or other cytokines) if effect on proliferation is observed. Wells are supplemented with 100 μl of medium containing 0.5 uCi of ³H-thymidine and cultured at 37 degrees C for 18-24 hr. Wells are harvested and incorporation of ³H-thymidine used as a measure of proliferation. Anti-CD3 alone is the positive control for proliferation. IL-2 (100 U/ml) is also used as a control which enhances proliferation. Control antibody which does not induce proliferation of T cells is used as the negative controls for the effects of agonists or antagonists of the invention.

[1032] The studies described in this example tested activity of agonists or antagonists of the invention. However, one skilled in the art could easily modify the exemplified studies to test the activity of polynucleotides or polypeptides of the invention (e.g., gene therapy).

### Example 23

[1033] Effect of Agonists or Antagonists of the Invention on the Expression of MHC Class II, Costimulatory and Adhesion Molecules and Cell Differentiation of Monocytes and Monocyte-Derived Human Dendritic Cells

[1034] Dendritic cells are generated by the expansion of proliferating precursors found in the peripheral blood: adherent PBMC or elutriated monocytic fractions are cultured for 7-10 days with GM-CSF (50 ng/ml) and IL-4 (20 ng/ml). These dendritic cells have the characteristic phenotype of immature cells (expression of CD1, CD80, CD86, CD40 and MHC class II antigens). Treatment with activating factors, such as TNF-α, causes a rapid change in surface phenotype (increased expression of MHC class I and II, costimulatory and adhesion molecules, downregulation of FCyRII, upregulation of CD83). These changes correlate with increased antigen-presenting capacity and with functional maturation of the dendritic cells.

[1035] FACS analysis of surface antigens is performed as follows. Cells are treated 1-3 days with increasing concentrations of agonist or antagonist of the invention or LPS (positive control), washed with PBS containing 1% BSA and 0.02 mM sodium azide, and then incubated with 1:20 dilution of appropriate FITC- or PE-labeled monoclonal antibodies for 30 minutes at 4 degrees C. After an additional wash, the labeled cells are analyzed by flow cytometry on a FACScan (Becton Dickinson).

[1036] Effect on the Production of Catokines.

[1037] Cytokines generated by dendritic cells, in particular IL-12, are important in the initiation of T-cell dependent immune responses. IL-12 strongly influences the development of Thl helper T-cell immune response, and induces cytotoxic T and NK cell function. An ELISA is used to measure the IL-12 release as follows. Dendritic cells (10⁶/ml) are treated with increasing concentrations of agonists or antagonists of the invention for 24 hours. LPS (100 ng/ml) is added to the cell culture as positive control. Supernatants from the cell cultures are then collected and analyzed for IL-12 content using commercial ELISA kit (e.g, R & D Systems (Minneapolis, Minn.)). The standard protocols provided with the kits are used.

[1038] Effect on the expression of MHC Class II, Costimulatory and Adhesion Molecules.

[1039] Three major families of cell surface antigens can be identified on monocytes: adhesion molecules, molecules involved in antigen presentation, and Fc receptor. Modulation of the expression of MHC class II antigens and other costimulatory molecules, such as B7 and ICAM-1, may result in changes in the antigen presenting capacity of monocytes and ability to induce T cell activation. Increase expression of Fc receptors may correlate with improved monocyte cytotoxic activity, cytokine release and phagocytosis.

[1040] FACS analysis is used to examine the surface antigens as follows. Monocytes are treated 1-5 days with increasing concentrations of agonists or antagonists of the invention or LPS (positive control), washed with PBS containing 1% BSA and 0.02 mM sodium azide, and then incubated with 1:20 dilution of appropriate FITC- or PE-labeled monoclonal antibodies for 30 minutes at 4 degreesC. After an additional wash, the labeled cells are analyzed by flow cytometry on a FACScan (Becton Dickinson).

[1041] Monocyte Activation and/or Increased Survival.

[1042] Assays for molecules that activate (or alternatively, inactivate) monocytes and/or increase monocyte survival (or alternatively, decrease monocyte survival) are known in the art and may routinely be applied to determine whether a molecule of the invention functions as an inhibitor or activator of monocytes. Agonists or antagonists of the invention can be screened using the three assays described below. For each of these assays, Peripheral blood mononuclear cells (PBMC) are purified from single donor leukopacks (American Red Cross, Baltimore, Md.) by centrifugation through a Histopaque gradient (Sigma). Monocytes are isolated from PBMC by counterflow centrifugal elutriation.

[1043] Monocyte Survival Assay.

[1044] Human peripheral blood monocytes progressively lose viability when cultured in absence of serum or other stimuli. Their death results from internally regulated process (apoptosis). Addition to the culture of activating factors, such as TNF-alpha dramatically improves cell survival and prevents DNA fragmentation. Propidium iodide (PI) staining is used to measure apoptosis as follows. Monocytes are cultured for 48 hours in polypropylene tubes in serum-free medium (positive control), in the presence of 100 ng/ml TNF-alpha (negative control), and in the presence of varying concentrations of the compound to be tested. Cells are suspended at a concentration of 2×10⁶/ml in PBS containing PI at a final concentration of 5 μg/ml, and then incubaed at room temperature for 5 minutes before FACScan analysis. PI uptake has been demonstrated to correlate with DNA fragmentation in this experimental paradigm.

[1045] Effect on Cytokine Release.

[1046] An important function of monocytes/macrophages is their regulatory activity on other cellular populations of the immune system through the release of cytokines after stimulation. An ELISA to measure cytokine release is performed as follows. Human monocytes are incubated at a density of 5×10⁵ cells/ml with increasing concentrations of agonists or antagonists of the invention and under the same conditions, but in the absence of agonists or antagonists. For IL-12 production, the cells are primed overnight with IFN (100 U/ml) in presence of agonist or antagonist of the invention. LPS (10 ng/ml) is then added. Conditioned media are collected after 24h and kept frozen until use. Measurement of TNF-alpha, IL-10, MCP-1 and IL-8 is then performed using a commercially available ELISA kit (e.g, R & D Systems (Minneapolis, Minn.)) and applying the standard protocols provided with the kit.

[1047] Oxidative burst. Purified monocytes are plated in 96-w plate at 2-1×10⁵ cell/well. Increasing concentrations of agonists or antagonists of the invention are added to the wells in a total volume of 0.2 ml culture medium (RPMI 1640+10% FCS, glutamine and antibiotics). After 3 days incubation, the plates are centrifuged and the medium is removed from the wells. To the macrophage monolayers, 0.2 ml per well of phenol red solution (140 mM NaCl, 10 mM potassium phosphate buffer pH 7.0, 5.5 MM dextrose, 0.56 mM phenol red and 19 U/ml of HRPO) is added, together with the stimulant (200 nM PMA). The plates are incubated at 37° C. for 2 hours and the reaction is stopped by adding 20 μl 1N NaOH per well. The absorbance is read at 610 nm. To calculate the amount of H₂O₂ produced by the macrophages, a standard curve of a H₂O₂ solution of known molarity is performed for each experiment.

[1048] The studies described in this example tested activity of agonists or antagonists of the invention. However, one skilled in the art could easily modify the exemplified studies to test the activity of polynucleotides or polypeptides of the invention (e.g., gene therapy).

### Example 24

[1049] Biological Effects of Agonists or Antagonists of the Invention Astrocyte and Neuronal Assays.

[1050] Agonists or antagonists of the invention, expressed in Escherichia coli and purified as described above, can be tested for activity in promoting the survival, neurite outgrowth, or phenotypic differentiation of cortical neuronal cells and for inducing the proliferation of glial fibrillary acidic protein immunopositive cells, astrocytes. The selection of cortical cells for the bioassay is based on the prevalent expression of FGF-1 and FGF-2 in cortical structures and on the previously reported enhancement of cortical neuronal survival resulting from FGF-2 treatment. A thymidine incorporation assay, for example, can be used to elucidate an agonist or antagonist of the invention's activity on these cells.

[1051] Moreover, previous reports describing the biological effects of FGF-2 (basic FGF) on cortical or hippocampal neurons in vitro have demonstrated increases in both neuron survival and neurite outgrowth (Walicke et al., “Fibroblast growth factor promotes survival of dissociated hippocampal neurons and enhances neurite extension.” Proc. Natl. Acad. Sci. USA 83:3012-3016. (1986), assay herein incorporated by reference in its entirety). However, reports from experiments done on PC-12 cells suggest that these two responses are not necessarily synonymous and may depend on not only which FGF is being tested but also on which receptor(s) are expressed on the target cells. Using the primary cortical neuronal culture paradigm, the ability of an agonist or antagonist of the invention to induce neurite outgrowth can be compared to the response achieved with FGF-2 using, for example, a thymidine incorporation assay.

[1052] Fibroblast and Endothelial Cell Assays.

[1053] Human lung fibroblasts are obtained from Clonetics (San Diego, Calif.) and maintained in growth media from Clonetics. Dermal microvascular endothelial cells are obtained from Cell Applications (San Diego, Calif.). For proliferation assays, the human lung fibroblasts and dermal microvascular endothelial cells can be cultured at 5,000 cells/well in a 96-well plate for one day in growth medium. The cells are then incubated for one day in 0.1% BSA basal medium. After replacing the medium with fresh 0.1% BSA medium, the cells are incubated with the test proteins for 3 days. Alamar Blue (Alamar Biosciences, Sacramento, Calif.) is added to each well to a final concentration of 10%. The cells are incubated for 4 hr. Cell viability is measured by reading in a CytoFluor fluorescence reader. For the PGE₂ assays, the human lung fibroblasts are cultured at 5,000 cells/well in a 96-well plate for one day. After a medium change to 0.1% BSA basal medium, the cells are incubated with FGF-2 or agonists or antagonists of the invention with or without IL-1α for 24 hours. The supernatants are collected and assayed for PGE₂ by EIA kit (Cayman, Ann Arbor, Mich.). For the IL-6 assays, the human lung fibroblasts are cultured at 5,000 cells/well in a 96-well plate for one day. After a medium change to 0.1% BSA basal medium, the cells are incubated with FGF-2 or with or without agonists or antagonists of the invention IL-1α for 24 hours. The supernatants are collected and assayed for IL-6 by ELISA kit (Endogen, Cambridge, Mass.).

[1054] Human lung fibroblasts are cultured with FGF-2 or agonists or antagonists of the invention for 3 days in basal medium before the addition of Alamar Blue to assess effects on growth of the fibroblasts. FGF-2 should show a stimulation at 10-2500 ng/ml which can be used to compare stimulation with agonists or antagonists of the invention.

[1055] Parkinson Models.

[1056] The loss of motor function in Parkinson's disease is attributed to a deficiency of striatal dopamine resulting from the degeneration of the nigrostriatal dopaminergic projection neurons. An animal model for Parkinson's that has been extensively characterized involves the systemic administration of 1-methyl-4 phenyl 1,2,3,6-tetrahydropyridine (MPTP). In the CNS, MPTP is taken-up by astrocytes and catabolized by monoamine oxidase B to 1-methyl-4-phenyl pyridine (MPP⁺) and released. Subsequently, MPP⁺ is actively accumulated in dopaminergic neurons by the high-affinity reuptake transporter for dopamine. MPP⁺ is then concentrated in mitochondria by the electrochemical gradient and selectively inhibits nicotidamide adenine disphosphate: ubiquinone oxidoreductionase (complex I), thereby interfering with electron transport and eventually generating oxygen radicals.

[1057] It has been demonstrated in tissue culture paradigms that FGF-2 (basic FGF) has trophic activity towards nigral dopaminergic neurons (Ferrari et al., Dev. Biol. 1989). Recently, Dr. Unsicker's group has demonstrated that administering FGF-2 in gel foam implants in the striatum results in the near complete protection of nigral dopaminergic neurons from the toxicity associated with MPTP exposure (Otto and Unsicker, J. Neuroscience, 1990).

[1058] Based on the data with FGF-2, agonists or antagonists of the invention can be evaluated to determine whether it has an action similar to that of FGF-2 in enhancing dopaminergic neuronal survival in vitro and it can also be tested in vivo for protection of dopaminergic neurons in the striatum from the damage associated with MPTP treatment. The potential effect of an agonist or antagonist of the invention is first examined in vitro in a dopaminergic neuronal cell culture paradigm. The cultures are prepared by dissecting the midbrain floor plate from gestation day 14 Wistar rat embryos. The tissue is dissociated with trypsin and seeded at a density of 200,000 cells/cm² on polyorthinine-laminin coated glass coverslips. The cells are maintained in Dulbecco's Modified Eagle's medium and F12 medium containing hormonal supplements (N1). The cultures are fixed with paraformaldehyde after 8 days in vitro and are processed for tyrosine hydroxylase, a specific marker for dopminergic neurons, immunohistochemical staining. Dissociated cell cultures are prepared from embryonic rats. The culture medium is changed every third day and the factors are also added at that time.

[1059] Since the dopaminergic neurons are isolated from animals at gestation day 14, a developmental time which is past the stage when the dopaminergic precursor cells are proliferating, an increase in the number of tyrosine hydroxylase immunopositive neurons would represent an increase in the number of dopaminergic neurons surviving in vitro. Therefore, if an agonist or antagonist of the invention acts to prolong the survival of dopaminergic neurons, it would suggest that the agonist or antagonist may be involved in Parkinson's Disease.

[1060] The studies described in this example tested activity of agonists or antagonists of the invention. However, one skilled in the art could easily modify the exemplified studies to test the activity of polynucleotides or polypeptides of the invention (e.g., gene therapy).

### Example 25

[1061] The Effect of Agonists or Antagonists of the Invention on the Growth of Vascular Endothelial Cells

[1062] On day 1, human umbilical vein endothelial cells (HUVEC) are seeded at 2-5×10⁴ cells/35 mm dish density in M199 medium containing 4% fetal bovine serum (FBS), 16 units/ml heparin, and 50 units/ml endothelial cell growth supplements (ECGS, Biotechnique, Inc.). On day 2, the medium is replaced with M199 containing 10% FBS, 8 units/ml heparin. An agonist or antagonist of the invention, and positive controls, such as VEGF and basic FGF (bFGF) are added, at varying concentrations. On days 4 and 6, the medium is replaced. On day 8, cell number is determined with a Coulter Counter.

[1063] An increase in the number of HUVEC cells indicates that the compound of the invention may proliferate vascular endothelial cells, while a decrease in the number of HUVEC cell indicates that the compound of the invention inhibits vascular endothelial cells.

[1064] The studies described in this example tested activity of a polypeptide of the invention. However, one skilled in the art could easily modify the exemplified studies to test the activity of polynucleotides (e.g., gene therapy), agonists, and/or antagonists of the invention.

### Example 26

[1065] Rat Corneal Wound Healing Model

[1066] This animal model shows the effect of an agonist or antagonist of the invention on neovascularization. The experimental protocol includes:

[1067] a) Making a 1-1.5 mm long incision from the center of cornea into the stromal layer.

[1068] b) Inserting a spatula below the lip of the incision facing the outer corner of the eye.

[1069] c) Making a pocket (its base is 1-1.5 mm form the edge of the eye).

[1070] d) Positioning a pellet, containing 50ng-5ug of an agonist or antagonist of the invention, within the pocket.

[1071] e) Treatment with an agonist or antagonist of the invention can also be applied topically to the corneal wounds in a dosage range of 20mg -500mg (daily treatment for five days).

[1072] The studies described in this example tested activity of agonists or antagonists of the invention. However, one skilled in the art could easily modify the exemplified studies to test the activity of polynucleotides or polypeptides of the invention (e.g., gene therapy).

### Example 27

[1073] Diabetic Mouse and Glucocorticoid-Impaired Wound Healing Models

[1074] A. Diabetic db+/db+ Mouse Model.

[1075] To demonstrate that an agonist or antagonist of the invention accelerates the healing process, the genetically diabetic mouse model of wound healing is used. The full thickness wound healing model in the db+/db+ mouse is a well characterized, clinically relevant and reproducible model of impaired wound healing. Healing of the diabetic wound is dependent on formation of granulation tissue and re-epithelialization rather than contraction (Gartner, M. H. et al., J. Surg. Res. 52:389 (1992); Greenhalgh, D.G. et al., Am. J. Pathol. 136:1235 (1990)).

[1076] The diabetic animals have many of the characteristic features observed in Type II diabetes mellitus. Homozygous (db+/db+) mice are obese in comparison to their normal heterozygous (db+/+m) litternates. Mutant diabetic (db+/db+) mice have a single autosomal recessive mutation on chromosome 4 (db+) (Coleman et al. Proc. Natl. Acad. Sci. USA 77:283-293 (1982)). Animals show polyphagia, polydipsia and polyuria. Mutant diabetic mice (db+/db+) have elevated blood glucose, increased or normal insulin levels, and suppressed cell-mediated immunity (Mandel et al., J. Immunol. 120:1375 (1978); Debray-Sachs, M. et al., Clin. Exp. Immunol. 51(1):1-7 (1983); Leiter et al., Am. J. of Pathol. 114:46-55 (1985)). Peripheral neuropathy, myocardial complications, and microvascular lesions, basement membrane thickening and glomerular filtration abnormalities have been described in these animals (Norido, F. et al., Exp. Neurol. 83(2):221-232 (1984); Robertson et al., Diabetes 29(1):60-67 (1980); Giacomelli et al., Lab Invest. 40(4):460-473 (1979); Coleman, D. L., Diabetes 31 (Suppl):1-6 (1982)). These homozygous diabetic mice develop hyperglycemia that is resistant to insulin analogous to human type II diabetes (Mandel et al., J. Immunol. 120:1375-1377 (1978)).

[1077] The characteristics observed in these animals suggests that healing in this model may be similar to the healing observed in human diabetes (Greenhalgh, et al., Am. J. of Pathol. 136:1235-1246 (1990)).

[1078] Genetically diabetic female C57BL/KsJ (db+/db+) mice and their non-diabetic (db+/+m) heterozygous littermates are used in this study (Jackson Laboratories). The animals are purchased at 6 weeks of age and are 8 weeks old at the beginning of the study. Animals are individually housed and received food and water ad libitum. All manipulations are performed using aseptic techniques. The experiments are conducted according to the rules and guidelines of Human Genome Sciences, Inc. Institutional Animal Care and Use Committee and the Guidelines for the Care and Use of Laboratory Animals.

[1079] Wounding protocol is performed according to previously reported methods (Tsuboi, R. and Rifkin, D. B., J. Exp. Med. 172:245-251 (1990)). Briefly, on the day of wounding, animals are anesthetized with an intraperitoneal injection of Avertin (0.01 mg/mL), 2,2,2-tribromoethanol and 2-methyl-2-butanol dissolved in deionized water. The dorsal region of the animal is shaved and the skin washed with 70% ethanol solution and iodine. The surgical area is dried with sterile gauze prior to wounding. An 8 mm full-thickness wound is then created using a Keyes tissue punch. mediately following wounding, the surrounding skin is gently stretched to eliminate wound expansion. The wounds are left open for the duration of the experiment. Application of the treatment is given topically for 5 consecutive days commencing on the day of wounding. Prior to treatment, wounds are gently cleansed with sterile saline and gauze sponges.

[1080] Wounds are visually examined and photographed at a fixed distance at the day of surgery and at two day intervals thereafter. Wound closure is determined by daily measurement on days 1-5 and on day 8. Wounds are measured horizontally and vertically using a calibrated Jameson caliper. Wounds are considered healed if granulation tissue is no longer visible and the wound is covered by a continuous epithelium.

[1081] An agonist or antagonist of the invention is administered using at a range different doses, from 4 mg to 500 mg per wound per day for 8 days in vehicle. Vehicle control groups received 50 mL of vehicle solution.

[1082] Animals are euthanized on day 8 with an intraperitoneal injection of sodium pentobarbital (300 mg/kg). The wounds and surrounding skin are then harvested for histology and immunohistochemistry. Tissue specimens are placed in 10% neutral buffered formalin in tissue cassettes between biopsy sponges for further processing. Three groups of 10 animals each (5 diabetic and 5 non-diabetic controls) are evaluated: 1) Vehicle placebo control, 2) untreated group, and 3) treated group. Wound closure is analyzed by measuring the area in the vertical and horizontal axis and obtaining the total square area of the wound. Contraction is then estimated by establishing the differences between the initial wound area (day 0) and that of post treatment (day 8). The wound area on day 1 is 64mm², the corresponding size of the dermal punch. Calculations are made using the following formula:

[Open area on day 8]−[Open area on day 1]/[Open area on day 1]

[1083] Specimens are fixed in 10% buffered formalin and paraffin embedded blocks are sectioned perpendicular to the wound surface (5 mm) and cut using a Reichert-Jung microtome. Routine hematoxylin-eosin (H&E) staining is performed on cross-sections of bisected wounds. Histologic examination of the wounds are used to assess whether the healing process and the morphologic appearance of the repaired skin is altered by treatment with an agonist or antagonist of the invention. This assessment included verification of the presence of cell accumulation, inflammatory cells, capillaries, fibroblasts, re-epithelialization and epidermal maturity (Greenhalgh, D.G. et al., Am. J. Pathol. 136:1235 (1990)). A calibrated lens micrometer is used by a blinded observer.

[1084] Tissue sections are also stained immunohistochemically with a polyclonal rabbit anti-human keratin antibody using ABC Elite detection system. Human skin is used as a positive tissue control while non-immune IgG is used as a negative control. Keratinocyte growth is determined by evaluating the extent of reepithelialization of the wound using a calibrated lens micrometer.

[1085] Proliferating cell nuclear antigen/cyclin (PCNA) in skin specimens is demonstrated by using anti-PCNA antibody (1:50) with an ABC Elite detection system. Human colon cancer served as a positive tissue control and human brain tissue is used as a negative tissue control. Each specimen included a section with omission of the primary antibody and substitution with non-immune mouse IgG. Ranking of these sections is based on the extent of proliferation on a scale of 0-8, the lower side of the scale reflecting slight proliferation to the higher side reflecting intense proliferation.

[1086] Experimental data are analyzed using an unpaired t test. A p value of <0.05 is considered significant.

[1087] B. Steroid Impaired Rat Model

[1088] The inhibition of wound healing by steroids has been well documented in various in vitro and in vivo systems (Wahl, Glucocorticoids and Wound healing. In: Anti-Inflammatory Steroid Action: Basic and Clinical Aspects. 280-302 (1989); Wahlet al., J. Immunol. 115: 476-481 (1975); Werb et al., J. Exp. Med. 147:1684-1694 (1978)). Glucocorticoids retard wound healing by inhibiting angiogenesis, decreasing vascular permeability (Ebert et al., An. Intern. Med. 37:701-705 (1952)), fibroblast proliferation, and collagen synthesis (Beck et al., Growth Factors. 5: 295-304 (1991); Haynes et al., J. Clin. Invest. 61: 703-797 (1978)) and producing a transient reduction of circulating monocytes (Haynes et al., J. Clin. Invest. 61: 703-797 (1978); Wahl, “Glucocorticoids and wound healing”, In: Antiinflammatory Steroid Action: Basic and Clinical Aspects, Academic Press, New York, pp. 280-302 (1989)). The systemic administration of steroids to impaired wound healing is a well establish phenomenon in rats (Beck et al., Growth Factors. 5: 295-304 (1991); Haynes et al., J. Clin. Invest. 61: 703-797 (1978); Wahl, “Glucocorticoids and wound healing”, In: Antiinflammatory Steroid Action: Basic and Clinical Aspects, Academic Press, New York, pp. 280-302 (1989); Pierce et al., Proc. Natl. Acad. Sci. USA 86: 2229-2233 (1989)).

[1089] To demonstrate that an agonist or antagonist of the invention can accelerate the healing process, the effects of multiple topical applications of the agonist or antagonist on full thickness excisional skin wounds in rats in which healing has been impaired by the systemic administration of methylprednisolone is assessed.

[1090] Young adult male Sprague Dawley rats weighing 250-300 g (Charles River Laboratories) are used in this example. The animals are purchased at 8 weeks of age and are 9 weeks old at the beginning of the study. The healing response of rats is impaired by the systemic administration of methylprednisolone (17 mg/kg/rat intramuscularly) at the time of wounding. Animals are individually housed and received food and water ad libitum. All manipulations are performed using aseptic techniques. This study is conducted according to the rules and guidelines of Human Genome Sciences, Inc. Institutional Animal Care and Use Committee and the Guidelines for the Care and Use of Laboratory Animals.

[1091] The wounding protocol is followed according to section A, above. On the day of wounding, animals are anesthetized with an intramuscular injection of ketamine (50 mg/kg) and xylazine (5 mg/kg). The dorsal region of the animal is shaved and the skin washed with 70% ethanol and iodine solutions. The surgical area is dried with sterile gauze prior to wounding. An 8 mm full-thickness wound is created using a Keyes tissue punch. The wounds are left open for the duration of the experiment. Applications of the testing materials are given topically once a day for 7 consecutive days commencing on the day of wounding and subsequent to methylprednisolone administration. Prior to treatment, wounds are gently cleansed with sterile saline and gauze sponges.

[1092] Wounds are visually examined and photographed at a fixed distance at the day of wounding and at the end of treatment. Wound closure is determined by daily measurement on days 1-5 and on day 8. Wounds are measured horizontally and vertically using a calibrated Jameson caliper. Wounds are considered healed if granulation tissue is no longer visible and the wound is covered by a continuous epithelium.

[1093] The agonist or antagonist of the invention is administered using at a range different doses, from 4 mg to 500 mg per wound per day for 8 days in vehicle. Vehicle control groups received 50 mL of vehicle solution.

[1094] Animals are euthanized on day 8 with an intraperitoneal injection of sodium pentobarbital (300 mg/kg). The wounds and surrounding skin are then harvested for histology. Tissue specimens are placed in 10% neutral buffered formalin in tissue cassettes between biopsy sponges for further processing.

[1095] Four groups of 10 animals each (5 with methylprednisolone and 5 without glucocorticoid) are evaluated: 1) Untreated group 2) Vehicle placebo control 3) treated groups.

[1096] Wound closure is analyzed by measuring the area in the vertical and horizontal axis and obtaining the total area of the wound. Closure is then estimated by establishing the differences between the initial wound area (day 0) and that of post treatment (day 8). The wound area on day 1 is 64 mm², the corresponding size of the dermal punch. Calculations are made using the following formula:

[Open area on day 8]−[Open area on day 1]/[Open area on day 1]

[1097] Specimens are fixed in 10% buffered formalin and paraffin embedded blocks are sectioned perpendicular to the wound surface (5 mm) and cut using an Olympus microtome. Routine hematoxylin-eosin (H&E) staining is performed on cross-sections of bisected wounds. Histologic examination of the wounds allows assessment of whether the healing process and the morphologic appearance of the repaired skin is improved by treatment with an agonist or antagonist of the invention. A calibrated lens micrometer is used by a blinded observer to determine the distance of the wound gap.

[1098] Experimental data are analyzed using an unpaired t test. A p value of <0.05 is considered significant.

[1099] The studies described in this example tested activity of agonists or antagonists of the invention. However, one skilled in the art could easily modify the exemplified studies to test the activity of polynucleotides or polypeptides of the invention (e.g., gene therapy).

### Example 28

[1100] Lymphadema Animal Model

[1101] The purpose of this experimental approach is to create an appropriate and consistent lymphedema model for testing the therapeutic effects of an agonist or antagonist of the invention in lymphangiogenesis and re-establishment of the lymphatic circulatory system in the rat hind limb. Effectiveness is measured by swelling volume of the affected limb, quantification of the amount of lymphatic vasculature, total blood plasma protein, and histopathology. Acute lymphedema is observed for 7-10 days. Perhaps more importantly, the chronic progress of the edema is followed for up to 3-4 weeks.

[1102] Prior to beginning surgery, blood sample is drawn for protein concentration analysis. Male rats weighing approximately ˜350 g are dosed with Pentobarbital. Subsequently, the right legs are shaved from knee to hip. The shaved area is swabbed with gauze soaked in 70% EtOH. Blood is drawn for serum total protein testing. Circumference and volumetric measurements are made prior to injecting dye into paws after marking 2 measurement levels (0.5 cm above heel, at mid-pt of dorsal paw). The intradermal dorsum of both right and left paws are injected with 0.05 ml of 1% Evan's Blue. Circumference and volumetric measurements are then made following injection of dye into paws.

[1103] Using the knee joint as a landmark, a mid-leg inguinal incision is made circumferentially allowing the femoral vessels to be located. Forceps and hemostats are used to dissect and separate the skin flaps. After locating the femoral vessels, the lymphatic vessel that runs along side and underneath the vessel(s) is located. The main lymphatic vessels in this area are then electrically coagulated or suture ligated.

[1104] Using a microscope, muscles in back of the leg (near the semitendinosis and adductors) are bluntly dissected. The popliteal lymph node is then located. The 2 proximal and 2 distal lymphatic vessels and distal blood supply of the popliteal node are then and ligated by suturing. The popliteal lymph node, and any accompanying adipose tissue, is then removed by cutting connective tissues.

[1105] Care is taken to control any mild bleeding resulting from this procedure. After lymphatics are occluded, the skin flaps are sealed by using liquid skin (Vetbond) (AJ Buck). The separated skin edges are sealed to the underlying muscle tissue while leaving a gap of ˜0.5 cm around the leg. Skin also may be anchored by suturing to underlying muscle when necessary.

[1106] To avoid infection, animals are housed individually with mesh (no bedding). Recovering animals are checked daily through the optimal edematous peak, which typically occurred by day 5-7. The plateau edematous peak are then observed. To evaluate the intensity of the lymphedema, the circumference and volumes of 2 designated places on each paw before operation and daily for 7 days are measured. The effect plasma proteins on lymphedema is determined and whether protein analysis is a useful testing perimeter is also investigated. The weights of both control and edematous limbs are evaluated at 2 places. Analysis is performed in a blind manner.

[1107] Circumference Measurements: Under brief gas anesthetic to prevent limb movement, a cloth tape is used to measure limb circumference. Measurements are done at the ankle bone and dorsal paw by 2 different people then those 2 readings are averaged. Readings are taken from both control and edematous limbs.

[1108] Volumetric Measurements: On the day of surgery, animals are anesthetized with Pentobarbital and are tested prior to surgery. For daily volumetrics animals are under brief halothane anesthetic (rapid immobilization and quick recovery), both legs are shaved and equally marked using waterproof marker on legs. Legs are first dipped in water, then dipped into instrument to each marked level then measured by Buxco edema software(Chen/Victor). Data is recorded by one person, while the other is dipping the limb to marked area.

[1109] Blood-plasma protein measurements: Blood is drawn, spun, and serum separated prior to surgery and then at conclusion for total protein and Ca2+ comparison.

[1110] Limb Weight Comparison: After drawing blood, the animal is prepared for tissue collection. The limbs are amputated using a quillitine, then both experimental and control legs are cut at the ligature and weighed. A second weighing is done as the tibio-cacaneal joint is disarticulated and the foot is weighed.

[1111] Histological Preparations: The transverse muscle located behind the knee (popliteal) area is dissected and arranged in a metal mold, filled with freezeGel, dipped into cold methylbutane, placed into labeled sample bags at −80EC until sectioning. Upon sectioning, the muscle is observed under fluorescent microscopy for lymphatics.

[1112] The studies described in this example tested activity of agonists or antagonists of the invention. However, one skilled in the art could easily modify the exemplified studies to test the activity of polynucleotides or polypeptides of the invention (e.g., gene therapy).

### Example 29

[1113] Suppression of TNF alpha-induced adhesion molecule expression by a Agonist or Antagonist of the Invention

[1114] The recruitment of lymphocytes to areas of inflammation and angiogenesis involves specific receptor-ligand interactions between cell surface adhesion molecules (CAMs) on lymphocytes and the vascular endothelium. The adhesion process, in both normal and pathological settings, follows a multi-step cascade that involves intercellular adhesion molecule-1 (ICAM-1), vascular cell adhesion molecule-1 (VCAM-1), and endothelial leukocyte adhesion molecule-1 (E-selectin) expression on endothelial cells (EC). The expression of these molecules and others on the vascular endothelium determines the efficiency with which leukocytes may adhere to the local vasculature and extravasate into the local tissue during the development of an inflammatory response. The local concentration of cytokines and growth factor participate in the modulation of the expression of these CAMs.

[1115] Tumor necrosis factor alpha (TNF-a), a potent proinflammatory cytokine, is a stimulator of all three CAMs on endothelial cells and may be involved in a wide variety of inflammatory responses, often resulting in a pathological outcome.

[1116] The potential of an agonist or antagonist of the invention to mediate a suppression of TNF-a induced CAM expression can be examined. A modified ELISA assay which uses ECs as a solid phase absorbent is employed to measure the amount of CAM expression on TNF-a treated ECs when co-stimulated with a member of the FGF family of proteins.

[1117] To perform the experiment, human umbilical vein endothelial cell (HUVEC) cultures are obtained from pooled cord harvests and maintained in growth medium (EGM-2; Clonetics, San Diego, Calif.) supplemented with 10% FCS and 1% penicillin/streptomycin in a 37 degree C humidified incubator containing 5% CO₂. HUVECs are seeded in 96-well plates at concentrations of 1×10⁴ cells/well in EGM medium at 37 degree C for 18-24 hrs or until confluent. The monolayers are subsequently washed 3 times with a serum-free solution of RPMI-1640 supplemented with 100 U/ml penicillin and 100 mg/ml streptomycin, and treated with a given cytokine and/or growth factor(s) for 24 h at 37 degree C. Following incubation, the cells are then evaluated for CAM expression.

[1118] Human Umbilical Vein Endothelial cells (HUVECs) are grown in a standard 96 well plate to confluence. Growth medium is removed from the cells and replaced with 90 ul of 199 Medium (10% FBS). Samples for testing and positive or negative controls are added to the plate in triplicate (in 10 ul volumes). Plates are incubated at 37 degree C for either 5 h (selectin and integrin expression) or 24 h (integrin expression only). Plates are aspirated to remove medium and 100 μl of 0.1% paraformaldehyde-PBS(with Ca++ and Mg++) is added to each well. Plates are held at 4° C. for 30 min.

[1119] Fixative is then removed from the wells and wells are washed IX with PBS(+Ca,Mg)+0.5% BSA and drained. Do not allow the wells to dry. Add 10 μl of diluted primary antibody to the test and control wells. Anti-ICAM-1-Biotin, Anti-VCAM-1-Biotin and Anti-E-selectin-Biotin are used at a concentration of 10 μg/ml (1:10 dilution of 0.1 mg/ml stock antibody). Cells are incubated at 37° C. for 30 min. in a humidified environment. Wells are washed ×3 with PBS(+Ca,Mg)+0.5% BSA.

[1120] Then add 20 Il of diluted ExtrAvidin-Alkaline Phosphotase (1:5,000 dilution) to each well and incubated at 37° C. for 30 min. Wells are washed ×3 with PBS(+Ca,Mg)+0.5% BSA. 1 tablet of p-Nitrophenol Phosphate pNPP is dissolved in 5 ml of glycine buffer (pH 10.4). 100 μl of pNPP substrate in glycine buffer is added to each test well. Standard wells in triplicate are prepared from the working dilution of the ExtrAvidin-Alkaline Phosphotase in glycine buffer: 1:5,000 (10⁰) >10^{-0.5}>10⁻¹>10^{-1.5}0.5 μl of each dilution is added to triplicate wells and the resulting AP content in each well is 5.50 ng, 1.74 ng, 0.55 ng, 0.18 ng. 100 μl of pNNP reagent must then be added to each of the standard wells. The plate must be incubated at 37° C. for 4h. A volume of 50 μl of 3M NaOH is added to all wells. The results are quantified on a plate reader at 405 nm. The background subtraction option is used on blank wells filled with glycine buffer only. The template is set up to indicate the concentration of AP-conjugate in each standard well [5.50 ng; 1.74 ng; 0.55 ng; 0.18 ng]. Results are indicated as amount of bound AP-conjugate in each sample.

[1121] The studies described in this example tested activity of agonists or antagonists of the invention. However, one skilled in the art could easily modify the exemplified studies to test the activity of polynucleotides or polypeptides of the invention (e.g., gene therapy).

### Example 30

[1122] Production Of Polypeptide of the Invention For High-Throughput Screening Assays

[1123] The following protocol produces a supernatant containing polypeptide of the present invention to be tested. This supernatant can then be used in the Screening Assays described in Examples 32-41.

[1124] First, dilute Poly-D-Lysine (644 587 Boehringer-Mannheim) stock solution (1 mg/ml in PBS) 1:20 in PBS (w/o calcium or magnesium 17-516F Biowhittaker) for a working solution of 50 ug/ml. Add 200 ul of this solution to each well (24 well plates) and incubate at RT for 20 minutes. Be sure to distribute the solution over each well (note: a 12-channel pipetter may be used with tips on every other channel). Aspirate off the Poly-D-Lysine solution and rinse with iml PBS (Phosphate Buffered Saline). The PBS should remain in the well until just prior to plating the cells and plates may be poly-lysine coated in advance for up to two weeks.

[1125] Plate 293T cells (do not carry cells past P+20) at 2×10⁵ cells/well in .5 ml DMEM(Dulbecco's Modified Eagle Medium)(with 4.5 G/L glucose and L-glutamine (12-604F Biowhittaker))/10% heat inactivated FBS(14-503F Biowhittaker)/1× Penstrep(17-602E Biowhittaker). Let the cells grow overnight.

[1126] The next day, mix together in a sterile solution basin: 300 ul Lipofectamine (18324-012 Gibco/BRL) and 5 ml Optimem 1 (31985070 Gibco/BRL)/96-well plate. With a small volume multi-channel pipetter, aliquot approximately 2 ug of an expression vector containing a polynucleotide insert, produced by the methods described in Examples 8-10, into an appropriately labeled 96-well round bottom plate. With a multi-channel pipetter, add 50ul of the Lipofectamine/Optimem I mixture to each well. Pipette up and down gently to mix. Incubate at RT 15-45 minutes. After about 20 minutes, use a multi-channel pipetter to add 150 ul Optimem I to each well. As a control, one plate of vector DNA lacking an insert should be transfected with each set of transfections.

[1127] Preferably, the transfection should be performed by tag-teaming the following tasks. By tag-teaming, hands on time is cut in half, and the cells do not spend too much time on PBS. First, person A aspirates off the media from four 24-well plates of cells, and then person B rinses each well with 0.5-1 ml PBS. Person A then aspirates off PBS rinse, and person B, using a12-channel pipetter with tips on every other channel, adds the 200 ul of DNA/Lipofectamine/Optimem I complex to the odd wells first, then to the even wells, to each row on the 24-well plates. Incubate at 37 degree C for 6 hours.

[1128] While cells are incubating, prepare appropriate media, either 1%BSA in DMEM with 1× penstrep, or HGS CHO-5 media (116.6 mg/L of CaCI2 (anhyd); 0.00130 mg/L CuSO₄-5H₂O; 0.050 mg/L of Fe(NO₃)₃-9H₂O; 0.417 mg/L of FeSO₄-7H₂O; 311.80 mg/L of Kcl; 28.64 mg/L of MgCl₂; 48.84 mg/L of MgSO₄; 6995.50 mg/L of NaCl; 2400.0 mg/L of NaHCO₃; 62.50 mg/L of NaH₂PO₄-H₂O; 71.02 mg/L of Na₂HPO4; 0.4320 mg/L of ZnSO₄-7H₂O; 0.002 mg/L of Arachidonic Acid; 1.022 mg/L of Cholesterol; 0.070 mg/L of DL-alpha-Tocopherol-Acetate; 0.0520 mg/L of Linoleic Acid; 0.010 mg/L of Linolenic Acid; 0.010 mg/L of Myristic Acid; 0.010 mg/L of Oleic Acid; 0.010 mg/L of Palmitric Acid; 0.010 mg/L of Palmitic Acid; 100 mg/L of Pluronic F-68; 0.010 mg/L of Stearic Acid; 2.20 mg/L of Tween 80; 4551 mg/L of D-Glucose; 130.85 mg/ml of L- Alanine; 147.50 mg/ml of L-Arginine-HCL; 7.50 mg/ml of L-Asparagine-H₂O; 6.65 mg/ml of L-Aspartic Acid; 29.56 mg/ml of L-Cystine-2HCL-H₂O; 31.29 mg/ml of L-Cystine-2HCL; 7.35 mg/ml of L-Glutamic Acid; 365.0 mg/ml of L-Glutamine; 18.75 mg/ml of Glycine; 52.48 mg/mil of L-Histidine-HCL-H₂0; 106.97 mg/ml of L-Isoleucine; 111.45 mg/ml of L-Leucine; 163.75 mg/ml of L-Lysine HCL; 32.34 mg/ml of L-Methionine; 68.48 mg/ml of L-Phenylalainine; 40.0 mg/ml of L-Proline; 26.25 mg/ml of L-Serine; 101.05 mg/ml of L-Threonine; 19.22 mg/ml of L-Tryptophan; 91.79 mg/ml of L-Tryrosine-2Na-2H20; and 99.65 mg/ml of L-Valine; 0.0035 mg/L of Biotin; 3.24 mg/L of D-Ca Pantothenate; 11.78 mg/L of Choline Chloride; 4.65 mg/L of Folic Acid; 15.60 mg/L of i-Inositol; 3.02 mg/L of Niacinamide; 3.00 mg/L of Pyridoxal HCL; 0.031 mg/L of Pyridoxine HCL; 0.319 mg/L of Riboflavin; 3.17 mg/L of Thiamine HCL; 0.365 mg/L of Thymidine; 0.680 mg/L of Vitamin B₁₂; 25 mM of HEPES Buffer; 2.39 mg/L of Na Hypoxanthine; 0.105 mg/L of Lipoic Acid; 0.081 mg/L of Sodium Putrescine-2HCL; 55.0 mg/L of Sodium Pyruvate; 0.0067 mg/L of Sodium Selenite; 20 uM of Ethanolamine; 0.122 mg/L of Ferric Citrate; 41.70 mg/L of Methyl-B-Cyclodextrin complexed with Linoleic Acid; 33.33 mg/L of Methyl-B-Cyclodextrin complexed with Oleic Acid; 10 mg/L of Methyl-B-Cyclodextrin complexed with Retinal Acetate. Adjust osmolarity to 327 mOsm) with 2 mm glutamine and 1× penstrep. (BSA (81-068-3 Bayer) 100 gm dissolved in 1L DMEM for a 10% BSA stock solution). Filter the media and collect 50 ul for endotoxin assay in 15 ml polystyrene conical.

[1129] The transfection reaction is terminated, preferably by tag-teaming, at the end of the incubation period. Person A aspirates off the transfection media, while person B adds 1.5 ml appropriate media to each well. Incubate at 37 degree C for 45 or 72 hours depending on the media used: 1%BSA for 45 hours or CHO-5 for 72 hours.

[1130] On day four, using a 300 ul multichannel pipetter, aliquot 600 ul in one lml deep well plate and the remaining supernatant into a 2 ml deep well. The supernatants from each well can then be used in the assays described in Examples 32-39.

[1131] It is specifically understood that when activity is obtained in any of the assays described below using a supernatant, the activity originates from either the polypeptide of the present invention directly (e.g., as a secreted protein) or by polypeptide of the present invention inducing expression of other proteins, which are then secreted into the supernatant. Thus, the invention further provides a method of identifying the protein in the supernatant characterized by an activity in a particular assay.

### Example 31

[1132] Construction of GAS Reporter Construct

[1133] One signal transduction pathway involved in the differentiation and proliferation of cells is called the Jaks-STATs pathway. Activated proteins in the Jaks-STATs pathway bind to gamma activation site “GAS” elements or interferon-sensitive responsive element (“ISRE”), located in the promoter of many genes. The binding of a protein to these elements alter the expression of the associated gene.

[1134] GAS and ISRE elements are recognized by a class of transcription factors called Signal Transducers and Activators of Transcription, or “STATs.” There are six members of the STATs family. Stat1 and Stat3 are present in many cell types, as is Stat2 (as response to IFN-alpha is widespread). Stat4 is more restricted and is not in many cell types though it has been found in T helper class I, cells after treatment with IL-12. Stat5 was originally called mammary growth factor, but has been found at higher concentrations in other cells including myeloid cells. It can be activated in tissue culture cells by many cytokines.

[1135] The STATs are activated to translocate from the cytoplasm to the nucleus upon tyrosine phosphorylation by a set of kinases known as the Janus Kinase (“Jaks”) family. Jaks represent a distinct family of soluble tyrosine kinases and include Tyk2, Jak1, Jak2, and Jak3. These kinases display significant sequence similarity and are generally catalytically inactive in resting cells.

[1136] The Jaks are activated by a wide range of receptors summarized in the Table below. (Adapted from review by Schidler and Darnell, Ann. Rev. Biochem. 64:621-51 (1995).) A cytokine receptor family, capable of activating Jaks, is divided into two groups: (a) Class 1 includes receptors for IL-2, IL-3, IL-4, IL-6, IL-7, IL-9, IL-11, IL-12, IL-15, Epo, PRL, GH, G-CSF, GM-CSF, LIF, CNTF, and thrombopoietin; and (b) Class 2 includes IFN-a, IFN-g, and IL-10. The Class 1 receptors share a conserved cysteine motif (a set of four conserved cysteines and one tryptophan) and a WSXWS motif (a membrane proximal region encoding Trp-Ser-Xxx-Trp-Ser (SEQ ID NO:1548)).

[1137] Thus, on binding of a ligand to a receptor, Jaks are activated, which in turn activate STATs, which then translocate and bind to GAS elements. This entire process is encompassed in the Jaks-STATs signal transduction pathway.

[1138] Therefore, activation of the Jaks-STATs pathway, reflected by the binding of the GAS or the ISRE element, can be used to indicate proteins involved in the proliferation and differentiation of cells. For example, growth factors and cytokines are known to activate the Jaks-STATs pathway. (See Table below.) Thus, by using GAS elements linked to reporter molecules, activators of the Jaks-STATs pathway can be identified.

JAKs

| | | | | | |
|---|---|---|---|---|---|
| Ligand | tyk2 | Jak1 | Jak2 | Jak3 | STATS GAS(elements) or ISRE |

IFN family

| | | | | | | |
|---|---|---|---|---|---|---|
| IFN-a/B | + | + | − | − | 1,2,3 | ISRE |
| IFN-g | | + | + | − | 1 | GAS (IRF1>Lys6>IFP) |
| Il-10 | + | ? | ? | − | 1,3 | |
| gp130 family | | | | | | |
| IL-6 (Pleiotrohic) | + | + | + | ? | 1,3 | GAS (IRF1>Lys6>IFP) |
| I1-11(Pleiotrohic) | ? | + | ? | ? | 1,3 | |
| OnM(Pleiotrohic) | ? | + | + | ? | 1,3 | |
| LIF(Pleiotrohic) | ? | + | + | ? | 1,3 | |
| CNTF(Pleiotrohic) | −/+ | + | + | ? | 1,3 | |
| G-CSF(Pleiotrohic) | ? | + | ? | ? | 1,3 | |
| IL-12(Pleiotrohic) | + | − | + | + | 1,3 | |
| g-C family | | | | | | |
| IL-2 (lymphocytes) | − | + | − | + | 1,3,5 | GAS |
| IL-4 (lymph/myeloid) | − | + | − | + | 6 | GAS (IRF1 = IFP |
| >>Ly6)(IgH) | | | | | | |
| IL-7 (lymphocytes) | − | + | − | + | 5 | GAS |
| IL-9 (lymphocytes) | − | + | − | + | 5 | GAS |
| IL-13 (lymphocyte) | − | + | ? | ? | 6 | GAS |
| IL-15 | ? | + | ? | + | 5 | GAS |
| gp140 family | | | | | | |
| IL-3 (myeloid) | − | − | + | − | 5 | GAS (IRF1>IFP>>Ly6) |
| IL-5 (myeloid) | − | − | + | − | 5 | GAS |
| GM-CSF (myeloid) | − | − | + | − | 5 | GAS |
| Growth hormone family | | | | | | |
| GH | ? | − | + | − | 5 | |
| PRL | ? | +/− | + | − | 1,3,5 | |
| EPO | ? | − | + | − | 5 | GAS(B- |
| CAS>IRF1=IFP>>Ly6) | | | | | | |
| Receptor Tyrosine Kinases | | | | | | |
| EGF | ? | + | + | − | 1,3 | GAS (IRF1) |
| PDGF | ? | + | + | − | 1,3 | |
| CSF-1 | ? | + | + | − | 1,3 | GAS (not IRF1) |

[1139] To construct a synthetic GAS containing promoter element, which is used in the Biological Assays described in Examples 32-33, a PCR based strategy is employed to generate a GAS-SV40 promoter sequence. The 5′ primer contains four tandem copies of the GAS binding site found in the IRF1 promoter and previously demonstrated to bind STATs upon induction with a range of cytokines (Rothman et al., Immunity 1:457-468 (1994).), although other GAS or ISRE elements can be used instead. The 5′ primer also contains 18 bp of sequence complementary to the SV40 early promoter sequence and is flanked with an XhoI site. The sequence of the 5′ primer is:

| | |
|---|---|
| 5′:GCGCCTCGAGATTTCCCCGAAATCTAGATTTCCCCGAAATGATTTCCCCGAA | (SEQ ID NO:1549) |
| ATGATTTCCCCGAAATATCTGCCATCTCAATTAG:3′. | |

[1140] The downstream primer is complementary to the SV40 promoter and is flanked with a Hind III site:

| | |
|---|---|
| 5′:GCGGCAAGCTTTTTGCAAAGCCTAGGC:3′ | (SEQ ID |
| | NO:1550). |

[1141] PCR amplification is performed using the SV40 promoter template present in the B-gal:promoter plasmid obtained from Clontech. The resulting PCR fragment is digested with XhoI/Hind III and subcloned into BLSK2-. (Stratagene.) Sequencing with forward and reverse primers confirms that the insert contains the following sequence:

| | |
|---|---|
| 5′:CTCGAGATTTCCCCGAAATCTAGATTTCCCCGAAATGATTCCCCGAAATGA | (SEQ ID NO:1551) |
| TTTCCCCGAAATATCTGCCATCTCAATTAGTCAGCAACCATAGTCCCGCCCCTA | |
| ACTCCGCCCATCCCGCCCCTAACTCCGCCCAGTTCCGCCCATTCTCCGCCCCAT | |
| GGCTGACTAATTTTTTTTATTTATGCAGAGGCCGAGGCCGCCTCGGCCTCTGAG | |
| CTATTCCAGAAGTAGTGAGGAGGCTTTTTTGGAGGCCTAGGCTTTTGCAAAAA | |
| GCTT:3′. | |

[1142] With this GAS promoter element linked to the SV40 promoter, a GAS:SEAP2 reporter construct is next engineered. Here, the reporter molecule is a secreted alkaline phosphatase, or “SEAP.” Clearly, however, any reporter molecule can be instead of SEAP, in this or in any of the other Examples. Well known reporter molecules that can be used instead of SEAP include chloramphenicol acetyltransferase (CAT), luciferase, alkaline phosphatase, B-galactosidase, green fluorescent protein (GFP), or any protein detectable by an antibody.

[1143] The above sequence confirmed synthetic GAS-SV40 promoter element is subcloned into the pSEAP-Promoter vector obtained from Clontech using HindIII and XhoI, effectively replacing the SV40 promoter with the amplified GAS:SV40 promoter element, to create the GAS-SEAP vector. However, this vector does not contain a neomycin resistance gene, and therefore, is not preferred for mammalian expression systems.

[1144] Thus, in order to generate mammalian stable cell lines expressing the GAS-SEAP reporter, the GAS-SEAP cassette is removed from the GAS-SEAP vector using SalI and NotI, and inserted into a backbone vector containing the neomycin resistance gene, such as pGFP-1 (Clontech), using these restriction sites in the multiple cloning site, to create the GAS-SEAP/Neo vector. Once this vector is transfected into mammalian cells, this vector can then be used as a reporter molecule for GAS binding as described in Examples 32-33.

[1145] Other constructs can be made using the above description and replacing GAS with a different promoter sequence. For example, construction of reporter molecules containing NFK-B and EGR promoter sequences are described in Examples 35 and 36. However, many other promoters can be substituted using the protocols described in these Examples. For instance, SRE, IL-2, NFAT, or Osteocalcin promoters can be substituted, alone or in combination (e.g., GAS/NF-KB/EGR, GAS/NF-KB, I1-2/NFAT, or NF-KB/GAS). Similarly, other cell lines can be used to test reporter construct activity, such as HELA (epithelial), HUVEC (endothelial), Reh (B-cell), Saos-2 (osteoblast), HUVAC (aortic), or Cardiomyocyte.

### Example 32

[1146] High-Throughput Screening Assay for T-cell Activity.

[1147] The following protocol is used to assess T-cell activity by identifying factors, and determining whether supernate containing a polypeptide of the invention proliferates and/or differentiates T-cells. T-cell activity is assessed using the GAS/SEAP/Neo construct produced in Example 31. Thus, factors that increase SEAP activity indicate the ability to activate the Jaks-STATS signal transduction pathway. The T-cell used in this assay is Jurkat T-cells (ATCC Accession No. TIB-152), although Molt-3 cells (ATCC Accession No. CRL-1552) and Molt-4 cells (ATCC Accession No. CRL-1582) cells can also be used.

[1148] Jurkat T-cells are lymphoblastic CD4+Thl helper cells. In order to generate stable cell lines, approximately 2 million Jurkat cells are transfected with the GAS-SEAP/neo vector using DMRIE-C (Life Technologies)(transfection procedure described below). The transfected cells are seeded to a density of approximately 20,000 cells per well and transfectants resistant to 1 mg/ml genticin selected. Resistant colonies are expanded and then tested for their response to increasing concentrations of interferon gamma. The dose response of a selected clone is demonstrated.

[1149] Specifically, the following protocol will yield sufficient cells for 75 wells containing 200 ul of cells. Thus, it is either scaled up, or performed in multiple to generate sufficient cells for multiple 96 well plates. Jurkat cells are maintained in RPMI+10% serum with 1%Pen-Strep. Combine 2.5 mls of OPTI-MEM (Life Technologies) with 10 ug of plasmid DNA in a T25 flask. Add 2.5 ml OPTI-MEM containing 50 ul of DMRIE-C and incubate at room temperature for 15-45 mins.

[1150] During the incubation period, count cell concentration, spin down the required number of cells (10⁷ per transfection), and resuspend in OPTI-MEM to a final concentration of 10⁷ cells/ml. Then add 1 ml of 1×10⁷ cells in OPTI-MEM to T25 flask and incubate at 37 degree C for 6 hrs. After the incubation, add 10 ml of RPMI+15% serum.

[1151] The Jurkat:GAS-SEAP stable reporter lines are maintained in RPMI +10% serum, 1 mg/ml Genticin, and 1% Pen-Strep. These cells are treated with supernatants containing polypeptide of the present invention or polypeptide of the present invention induced polypeptides as produced by the protocol described in Example 30.

[1152] On the day of treatment with the supernatant, the cells should be washed and resuspended in fresh RPMI+10% serum to a density of 500,000 cells per ml. The exact number of cells required will depend on the number of supernatants being screened. For one 96 well plate, approximately 10 million cells (for 10 plates, 100 million cells) are required.

[1153] Transfer the cells to a triangular reservoir boat, in order to dispense the cells into a 96 well dish, using a 12 channel pipette. Using a 12 channel pipette, transfer 200 ul of cells into each well (therefore adding 100, 000 cells per well).

[1154] After all the plates have been seeded, 50 ul of the supernatants are transferred directly from the 96 well plate containing the supernatants into each well using a 12 channel pipette. In addition, a dose of exogenous interferon gamma (0.1, 1.0, 10 ng) is added to wells H9, H10, and H11 to serve as additional positive controls for the assay.

[1155] The 96 well dishes containing Jurkat cells treated with supernatants are placed in an incubator for 48 hrs (note: this time is variable between 48-72 hrs). 35 ul samples from each well are then transferred to an opaque 96 well plate using a 12 channel pipette. The opaque plates should be covered (using sellophene covers) and stored at −20 degree C until SEAP assays are performed according to Example 36. The plates containing the remaining treated cells are placed at 4 degree C and serve as a source of material for repeating the assay on a specific well if desired.

[1156] As a positive control, 100 Unit/ml interferon gamma can be used which is known to activate Jurkat T cells. Over 30 fold induction is typically observed in the positive control wells.

[1157] The above protocol may be used in the generation of both transient, as well as, stable transfected cells, which would be apparent to those of skill in the art.

### Example 34

[1158] High-Throughput Screening Assay Identifying Myeloid Activity

[1159] The following protocol is used to assess myeloid activity of polypeptide of the present invention by determining whether polypeptide of the present invention proliferates and/or differentiates myeloid cells. Myeloid cell activity is assessed using the GASISEAP/Neo construct produced in Example 32. Thus, factors that increase SEAP activity indicate the ability to activate the Jaks-STATS signal transduction pathway. The myeloid cell used in this assay is U937, a pre-monocyte cell line, although TF-1, HL60, or KG1 can be used.

[1160] To transiently transfect U937 cells with the GAS/SEAP/Neo construct produced in Example 32, a DEAE-Dextran method (Kharbanda et. al., 1994, Cell Growth & Differentiation, 5:259-265) is used. First, harvest 2×10e⁷ U937 cells and wash with PBS. The U937 cells are usually grown in RPMI 1640 medium containing 10% heat-inactivated fetal bovine serum (FBS) supplemented with 100 units/ml penicillin and 100 mg/ml streptomycin.

[1161] Next, suspend the cells in 1 ml of 20 mM Tris-HCl (pH 7.4) buffer containing 0.5 mg/ml DEAE-Dextran, 8 ug GAS-SEAP2 plasmid DNA, 140 mM NaCl, 5 mM KCl, 375 uM Na₂HPO₄.7H₂O, 1 mM MgCl₂, and 675 uM CaCi₂. Incubate at 37 degrees C for 45 min.

[1162] Wash the cells with RPMI 1640 medium containing 10% FBS and then resuspend in 10 ml complete medium and incubate at 37 degree C for 36 hr.

[1163] The GAS-SEAP/U937 stable cells are obtained by growing the cells in 400 ug/ml G418. The G418-free medium is used for routine growth but every one to two months, the cells should be re-grown in 400 ug/ml G418 for couple of passages.

[1164] These cells are tested by harvesting 1×10⁸ cells (this is enough for ten 96-well plates assay) and wash with PBS. Suspend the cells in 200 ml above described growth medium, with a final density of 5×10⁵ cells/ml. Plate 200 ul cells per well in the 96-well plate (or 1×10⁵ cells/well).

[1165] Add 50 ul of the supernatant prepared by the protocol described in Example 30. Incubate at 37 degee C for 48 to 72 hr. As a positive control, 100 Unit/ml interferon gamma can be used which is known to activate U937 cells. Over 30 fold induction is typically observed in the positive control wells. SEAP assay the supernatant according to the protocol described in Example 36.

### Example 34

[1166] High-Throughput Screening Assay Identifying Neuronal Activity.

[1167] When cells undergo differentiation and proliferation, a group of genes are activated through many different signal transduction pathways. One of these genes, EGRI (early growth response gene 1), is induced in various tissues and cell types upon activation. The promoter of EGRI is responsible for such induction. Using the EGR1 promoter linked to reporter molecules, activation of cells can be assessed by polypeptide of the present invention.

[1168] Particularly, the following protocol is used to assess neuronal activity in PC12 cell lines. PC12 cells (rat phenochromocytoma cells) are known to proliferate and/or differentiate by activation with a number of mitogens, such as TPA (tetradecanoyl phorbol acetate), NGF (nerve growth factor), and EGF (epidermal growth factor). The EGRI gene expression is activated during this treatment. Thus, by stably transfecting PC12 cells with a construct containing an EGR promoter linked to SEAP reporter, activation of PC12 cells by polypeptide of the present invention can be assessed.

[1169] The EGR/SEAP reporter construct can be assembled by the following protocol. The EGR-1 promoter sequence (−633 to +1)(Sakamoto K et al., Oncogene 6:867-871 (1991)) can be PCR amplified from human genomic DNA using the following primers:

5′ GCGCTCGAGGGATGACAGCGATAGAACCCCGG-3′ (SEQ ID NO:1552)

[1170] and

5′ GCGAAGCTTCGCGACTCCCCGGATCCGCCTC-3′ (SEQ ID NO:1553).

[1171] Using the GAS:SEAP/Neo vector produced in Example 31, EGR1 amplified product can then be inserted into this vector. Linearize the GAS:SEAP/Neo vector using restriction enzymes Xhol/HindIII, removing the GAS/SV40 stuffer. Restrict the EGR1 amplified product with these same enzymes. Ligate the vector and the EGR1 promoter.

[1172] To prepare 96 well-plates for cell culture, two mls of a coating solution (1:30 dilution of collagen type I (Upstate Biotech Inc. Cat#08-115) in 30% ethanol (filter sterilized)) is added per one 10 cm plate or 50 ml per well of the 96-well plate, and allowed to air dry for 2 hr.

[1173] PC12 cells are routinely grown in RPMI-1640 medium (Bio Whittaker) containing 10% horse serum (JRH BIOSCIENCES, Cat. # 12449-78P), 5% heat-inactivated fetal bovine serum (FBS) supplemented with 100 units/ml penicillin and 100 ug/ml streptomycin on a precoated 10 cm tissue culture dish. One to four split is done every three to four days. Cells are removed from the plates by scraping and resuspended with pipetting up and down for more than 15 times.

[1174] Transfect the EGR/SEAP/Neo construct into PC12 using the Lipofectamine protocol described in Example 31. EGR-SEAP/PC12 stable cells are obtained by growing the cells in 300 ug/ml G418. The G418-free medium is used for routine growth but every one to two months, the cells should be re-grown in 300 ug/ml G418 for couple of passages.

[1175] To assay for neuronal activity, a 10 cm plate with cells around 70 to 80% confluent is screened by removing the old medium. Wash the cells once with PBS (Phosphate buffered saline). Then starve the cells in low serum medium (RPMI-1640 containing 1% horse serum and 0.5% FBS with antibiotics) overnight.

[1176] The next morning, remove the medium and wash the cells with PBS. Scrape off the cells from the plate, suspend the cells well in 2 ml low serum medium. Count the cell number and add more low serum medium to reach final cell density as 5×10⁵ cells/ml.

[1177] Add 200 ul of the cell suspension to each well of 96-well plate (equivalent to 1×10⁵ cells/well). Add 50 ul supernatant produced by Example 31, 37 degree C for 48 to 72 hr. As a positive control, a growth factor known to activate PC12 cells through EGR can be used, such as 50 ng/ul of Neuronal Growth Factor (NGF). Over fifty-fold induction of SEAP is typically seen in the positive control wells. SEAP assay the supernatant according to Example 37.

### Example 36

[1178] High-Throughput Screening Assayfor T-cell Activity

[1179] NF-KB (Nuclear Factor KB) is a transcription factor activated by a wide variety of agents including the inflammatory cytokines IL-1 and TNF, CD30 and CD40, lymphotoxin-alpha and lymphotoxin-beta, by exposure to LPS or thrombin, and by expression of certain viral gene products. As a transcription factor, NF-KB regulates the expression of genes involved in immune cell activation, control of apoptosis (NF- KB appears to shield cells from apoptosis), B and T-cell development, anti-viral and antimicrobial responses, and multiple stress responses.

[1180] In non-stimulated conditions, NF- KB is retained in the cytoplasm with I-KB (Inhibitor KB). However, upon stimulation, I- KB is phosphorylated and degraded, causing NF- KB to shuttle to the nucleus, thereby activating transcription of target genes. Target genes activated by NF- KB include IL-2, IL-6, GM-CSF, ICAM-1 and class 1 MHC.

[1181] Due to its central role and ability to respond to a range of stimuli, reporter constructs utilizing the NF-KB promoter element are used to screen the supernatants produced in Example 30. Activators or inhibitors of NF-KB would be useful in treating, preventing, and/or diagnosing diseases. For example, inhibitors of NF-KB could be used to treat those diseases related to the acute or chronic activation of NF-KB, such as rheumatoid arthritis.

[1182] To construct a vector containing the NF-KB promoter element, a PCR based strategy is employed. The upstream primer contains four tandem copies of the NF-KB binding site

(GGGGACTTTCCC) (SEQ ID NO:1554),

[1183] 18 bp of sequence complementary to the 5′ end of the SV40 early promoter sequence, and is flanked with an XhoI site:

| | |
|---|---|
| 5′:GCGGCCTCGAGGGGACTTTCCCGGGGACTTTCCGGGGACTTTCCGGGACTTT | (SEQ ID NO:1555) |
| CCATCCTGCCATCTCAATTAG:3′. | |

[1184] The downstream primer is complementary to the 3′ end of the SV40 promoter and is flanked with a Hind III site:

[1185] 5′:GCGGCAAGCTTTTTGCAAAGCCTAGGC:3′ (SEQ ID NO: 1550).

[1186] PCR amplification is performed using the SV40 promoter template present in the pB-gal:promoter plasmid obtained from Clontech. The resulting PCR fragment is digested with XhoI and Hind III and subcloned into BLSK2-. (Stratagene) Sequencing with the T7 and T3 primers confirms the insert contains the following sequence:

| | |
|---|---|
| 5′:CTCGAGGGGACTTTCCCGGGGACTTTCCGGGGACTTTCCGGGACTTTCCATC | (SEQ ID NO:1556) |
| TGCCATCTCAATTAGTCAGCAACCATAGTCCCGCCCCTAACTCCGCCCATCCC | |
| GCCCCTAACTCCGCCCAGTTCCGCCCATTCTCCGCCCCATGGCTGACTAATTTT | |
| TTTTATTTATGCAGAGGCCGAGGCCGCCTCGGCCTCTGAGCTATTCCAGAAGT | |
| AGTGAGGAGGCTTTTTTGGAGGCCTAGGCTTTTGCAAAAAGCTT:3′. | |

[1187] Next, replace the SV40 minimal promoter element present in the pSEAP2-promoter plasmid (Clontech) with this NF-KBISV40 fragment using XhoI and HindIII. However, this vector does not contain a neomycin resistance gene, and therefore, is not preferred for mammalian expression systems.

[1188] In order to generate stable mammalian cell lines, the NF-KB/SV40/SEAP cassette is removed from the above NF-KB/SEAP vector using restriction enzymes SalI and NotI, and inserted into a vector containing neomycin resistance. Particularly, the NF-KB/SV40/SEAP cassette was inserted into pGFP-1 (Clontech), replacing the GFP gene, after restricting pGFP-1 with SalI and NotI.

[1189] Once NF-KB/SV40/SEAP/Neo vector is created, stable Jurkat T-cells are created and maintained according to the protocol described in Example 32. Similarly, the method for assaying supernatants with these stable Jurkat T-cells is also described in Example 32. As a positive control, exogenous TNF alpha (0.1,1, 10 ng) is added to wells H9, H10, and H11, with a 5-10 fold activation typically observed.

### Example 36

[1190] Assay for SEAP Activity

[1191] As a reporter molecule for the assays described in Examples 32-35, SEAP activity is assayed using the Tropix Phospho-light Kit (Cat. BP-400) according to the following general procedure. The Tropix Phospho-light Kit supplies the Dilution, Assay, and Reaction Buffers used below.

[1192] Prime a dispenser with the 2.5× Dilution Buffer and dispense 15 ul of 2.5× dilution buffer into Optiplates containing 35 ul of a supernatant. Seal the plates with a plastic sealer and incubate at 65 degree C for 30 min. Separate the Optiplates to avoid uneven heating.

[1193] Cool the samples to room temperature for 15 minutes. Empty the dispenser and prime with the Assay Buffer. Add 50 ml Assay Buffer and incubate at room temperature 5 min. Empty the dispenser and prime with the Reaction Buffer (see the table below). Add 50 ul Reaction Buffer and incubate at room temperature for 20 minutes. Since the intensity of the cherniluminescent signal is time dependent, and it takes about 10 minutes to read 5 plates on luminometer, one should treat 5 plates at each time and start the second set 10 minutes later.

[1194] Read the relative light unit in the luminometer. Set H12 as blank, and print the results. An increase in chemiluminescence indicates reporter activity.

[1195] Reaction Buffer Formulation:

| # of plates | Rxn buffer diluent (ml) | CSPD (ml) |
|---|---|---|
| 10 | 60 | 3 |
| 11 | 65 | 3.25 |
| 12 | 70 | 3.5 |
| 13 | 75 | 3.75 |
| 14 | 80 | 4 |
| 15 | 85 | 4.25 |
| 16 | 90 | 4.5 |
| 17 | 95 | 4.75 |
| 18 | 100 | 5 |
| 19 | 105 | 5.25 |
| 20 | 110 | 5.5 |
| 21 | 115 | 5.75 |
| 22 | 120 | 6 |
| 23 | 125 | 6.25 |
| 24 | 130 | 6.5 |
| 25 | 135 | 6.75 |
| 26 | 140 | 7 |
| 27 | 145 | 7.25 |
| 28 | 150 | 7.5 |
| 29 | 155 | 7.75 |
| 30 | 160 | 8 |
| 31 | 165 | 8.25 |
| 32 | 170 | 8.5 |
| 33 | 175 | 8.75 |
| 34 | 180 | 9 |
| 35 | 185 | 9.25 |
| 36 | 190 | 9.5 |
| 37 | 195 | 9.75 |
| 38 | 200 | 10 |
| 39 | 205 | 10.25 |
| 40 | 210 | 10.5 |
| 41 | 215 | 10.75 |
| 42 | 220 | 11 |
| 43 | 225 | 11.25 |
| 44 | 230 | 11.5 |
| 45 | 235 | 11.75 |
| 46 | 240 | 12 |
| 47 | 245 | 12.25 |
| 48 | 250 | 12.5 |
| 49 | 255 | 12.75 |
| 50 | 260 | 13 |

### Example 37

[1196] High-Throughput Screening Assay Identifying Changes in Small Molecule Concentration and Membrane Permeability

[1197] Binding of a ligand to a receptor is known to alter intracellular levels of small molecules, such as calcium, potassium, sodium, and pH, as well as alter membrane potential. These alterations can be measured in an assay to identify supernatants which bind to receptors of a particular cell. Although the following protocol describes an assay for calcium, this protocol can easily be modified to detect changes in potassium, sodium, pH, membrane potential, or any other small molecule which is detectable by a fluorescent probe.

[1198] The following assay uses Fluorometric Imaging Plate Reader (“FLIPR”) to measure changes in fluorescent molecules (Molecular Probes) that bind small molecules. Clearly, any fluorescent molecule detecting a small molecule can be used instead of the calcium fluorescent molecule, fluo-4 (Molecular Probes, Inc.; catalog no. F-14202), used here.

[1199] For adherent cells, seed the cells at 10,000-20,000 cells/well in a Co-star black 96-well plate with clear bottom. The plate is incubated in a CO₂ incubator for 20 hours. The adherent cells are washed two times in Biotek washer with 200 ul of HBSS (Hank's Balanced Salt Solution) leaving 100 ul of buffer after the final wash.

[1200] A stock solution of 1 mg/ml fluo-4 is made in 10% pluronic acid DMSO. To load the cells with fluo-4, 50 ul of 12 ug/ml fluo-4 is added to each well. The plate is incubated at 37 degrees C in a CO₂ incubator for 60 min. The plate is washed four times in the Biotek washer with HBSS leaving 100 ul of buffer.

[1201] For non-adherent cells, the cells are spun down from culture media. Cells are re-suspended to 2-5×10⁶ cells/ml with HBSS in a 50-ml conical tube. 4 ul of 1 mg/ml fluo-4 solution in 10% pluronic acid DMSO is added to each ml of cell suspension. The tube is then placed in a 37 degrees C water bath for 30-60 min. The cells are washed twice with HBSS, resuspended to 1×10⁶ cells/ml, and dispensed into a microplate, 100 ul/well. The plate is centrifuged at 1000 rpm for 5 min. The plate is then washed once in Denley Cell Wash with 200 ul, followed by an aspiration step to 100 ul final volume.

[1202] For a non-cell based assay, each well contains a fluorescent molecule, such as fluo-4. The supernatant is added to the well, and a change in fluorescence is detected.

[1203] To measure the fluorescence of intracellular calcium, the FLIPR is set for the following parameters: (1) System gain is 300-800 mW; (2) Exposure time is 0.4 second; (3) Camera F/stop is F/2; (4) Excitation is 488 nm; (5) Emission is 530 nm; and (6) Sample addition is 50 ul. Increased emission at 530 nm indicates an extracellular signaling event caused by the a molecule, either polypeptide of the present invention or a molecule induced by polypeptide of the present invention, which has resulted in an increase in the intracellular Ca++ concentration.

### Example 38

[1204] High-Throughput Screening Assay Identifying Tyrosine Kinase Activity

[1205] The Protein Tyrosine Kinases (PTK) represent a diverse group of transmembrane and cytoplasmic kinases. Within the Receptor Protein Tyrosine Kinase RPTK) group are receptors for a range of mitogenic and metabolic growth factors including the PDGF, FGF, EGF, NGF, HGF and Insulin receptor subfamilies. In addition there are a large family of RPTKs for which the corresponding ligand is unknown. Ligands for RPTKs include mainly secreted small proteins, but also membrane-bound and extracellular matrix proteins.

[1206] Activation of RPTK by ligands involves ligand-mediated receptor dimerization, resulting in transphosphorylation of the receptor subunits and activation of the cytoplasmic tyrosine kinases. The cytoplasmic tyrosine kinases include receptor associated tyrosine kinases of the src-family (e.g., src, yes, lck, lyn, fyn) and non-receptor linked and cytosolic protein tyrosine kinases, such as the Jak family, members of which mediate signal transduction triggered by the cytokine superfamily of receptors (e.g., the Interleukins, Interferons, GM-CSF, and Leptin).

[1207] Because of the wide range of known factors capable of stimulating tyrosine kinase activity, identifying whether polypeptide of the present invention or a molecule induced by polypeptide of the present invention is capable of activating tyrosine kinase signal transduction pathways is of interest. Therefore, the following protocol is designed to identify such molecules capable of activating the tyrosine kinase signal transduction pathways.

[1208] Seed target cells (e.g., primary keratinocytes) at a density of approximately 25,000 cells per well in a 96 well Loprodyne Silent Screen Plates purchased from Nalge Nunc (Naperville, Ill.). The plates are sterilized with two 30 minute rinses with 100% ethanol, rinsed with water and dried overnight. Some plates are coated for 2 hr with 100 ml of cell culture grade type I collagen (50 mg/mil), gelatin (2%) or polylysine (50 mg/ml), all of which can be purchased from Sigma Chemicals (St. Louis, Mo.) or 10% Matrigel purchased from Becton Dickinson (Bedford, Mass.), or calf serum, rinsed with PBS and stored at 4 degree C. Cell growth on these plates is assayed by seeding 5,000 cells/well in growth medium and indirect quantitation of cell number through use of alamarBlue as described by the manufacturer Alamar Biosciences, Inc. (Sacramento, Calif.) after 48 hr. Falcon plate covers #3071 from Becton Dickinson (Bedford,Mass.) are used to cover the Loprodyne Silent Screen Plates. Falcon Microtest III cell culture plates can also be used in some proliferation experiments.

[1209] To prepare extracts, A431 cells are seeded onto the nylon membranes of Loprodyne plates (20,000/200 mllwell) and cultured overnight in complete medium. Cells are quiesced by incubation in serum-free basal medium for 24 hr. After 5-20 minutes treatment with EGF (60 ng/ml) or 50 ul of the supernatant produced in Example 30, the medium was removed and 100 ml of extraction buffer ((20 mM HEPES pH 7.5, 0.15 M NaCl, 1% Triton X-100, 0.1% SDS, 2 mM Na3VO4, 2 mM Na4P2O7 and a cocktail of protease inhibitors (# 1836170) obtained from Boeheringer Mannheim (Indianapolis, Ind.) is added to each well and the plate is shaken on a rotating shaker for 5 minutes at 4° C. The plate is then placed in a vacuum transfer manifold and the extract filtered through the 0.45 mm membrane bottoms of each well using house vacuum. Extracts are collected in a 96-well catch/assay plate in the bottom of the vacuum manifold and immediately placed on ice. To obtain extracts clarified by centrifugation, the content of each well, after detergent solubilization for 5 minutes, is removed and centrifuged for 15 minutes at 4 degree C at 16,000× g.

[1210] Test the filtered extracts for levels of tyrosine kinase activity. Although many methods of detecting tyrosine kinase activity are known, one method is described here.

[1211] Generally, the tyrosine kinase activity of a supernatant is evaluated by determining its ability to phosphorylate a tyrosine residue on a specific substrate (a biotinylated peptide). Biotinylated peptides that can be used for this purpose include PSKI (corresponding to amino acids 6-20 of the cell division kinase cdc2-p34) and PSK2 (corresponding to amino acids 1-17 of gastrin). Both peptides are substrates for a range of tyrosine kinases and are available from Boehringer Mannheim.

[1212] The tyrosine kinase reaction is set up by adding the following components in order. First, add 10 ul of 5uM Biotinylated Peptide, then lOul ATP/Mg₂₊ (5 mM ATP/50 mM MgCl₂), then 10 ul of 5× Assay Buffer (40 mM imidazole hydrochloride, pH7.3, 40 mM beta-glycerophosphate, 1 mM EGTA, 100 mM MgCl₂, 5 mM MnCl₂, 0.5 mg/ml BSA), then Sul of Sodium Vanadate(1 mM), and then Sul of water. Mix the components gently and preincubate the reaction mix at 30 degree C for 2 min. Initial the reaction by adding 10 ul of the control enzyme or the filtered supernatant.

[1213] The tyrosine kinase assay reaction is then terminated by adding 10 ul of 120 mm EDTA and place the reactions on ice.

[1214] Tyrosine kinase activity is determined by transferring 50 ul aliquot of reaction mixture to a microtiter plate (MTP) module and incubating at 37 degree C for 20 min. This allows the streptavadin coated 96 well plate to associate with the biotinylated peptide. Wash the MTP module with 300 ul/well of PBS four times. Next add 75 ul of anti-phospotyrosine antibody conjugated to horse radish peroxidase(anti-P-Tyr-POD(0.5 u/ml)) to each well and incubate at 37 degree C for one hour. Wash the well as above.

[1215] Next add 100 ul of peroxidase substrate solution (Boehringer Mannheim) and incubate at room temperature for at least 5 mins (up to 30 min). Measure the absorbance of the sample at 405 nm by using ELISA reader. The level of bound peroxidase activity is quantitated using an ELISA reader and reflects the level of tyrosine kinase activity.

### Example 39

[1216] High-Throughput Screening Assay Identifying Phosphorylation Activity

[1217] As a potential alternative and/or compliment to the assay of protein tyrosine kinase activity described in Example 38, an assay which detects activation (phosphorylation) of major intracellular signal transduction intermediates can also be used. For example, as described below one particular assay can detect tyrosine phosphorylation of the Erk-1 and Erk-2 kinases. However, phosphorylation of other molecules, such as Raf, JNK, p38 MAP, Map kinase kinase (MEK), MEK kinase, Src, Muscle specific kinase (MuSK), IRAK, Tec, and Janus, as well as any other phosphoserine, phosphotyrosine, or phosphothreonine molecule, can be detected by substituting these molecules for Erk-1 or Erk-2 in the following assay.

[1218] Specifically, assay plates are made by coating the wells of a 96-well ELISA plate with 0.1 ml of protein G (lug/ml) for 2 hr at room temp, (RT). The plates are then rinsed with PBS and blocked with 3% BSA/PBS for 1 hr at RT. The protein G plates are then treated with 2 commercial monoclonal antibodies (100 ng/well) against Erk-1 and Erk-2 (1 hr at RT) (Santa Cruz Biotechnology). (To detect other molecules, this step can easily be modified by substituting a monoclonal antibody detecting any of the above described molecules.) After 3-5 rinses with PBS, the plates are stored at 4 degree C until use.

[1219] A431 cells are seeded at 20,000/well in a 96-well Loprodyne filterplate and cultured overnight in growth medium. The cells are then starved for 48 hr in basal medium (DMEM) and then treated with EGF (6ng/well) or 50 ul of the supernatants obtained in Example 30 for 5-20 minutes. The cells are then solubilized and extracts filtered directly into the assay plate.

[1220] After incubation with the extract for 1 hr at RT, the wells are again rinsed. As a positive control, a commercial preparation of MAP kinase (lOng/well) is used in place of A431 extract. Plates are then treated with a commercial polyclonal (rabbit) antibody (1 ug/ml) which specifically recognizes the phosphorylated epitope of the Erk-1 and Erk-2 kinases (1 hr at RT). This antibody is biotinylated by standard procedures. The bound polyclonal antibody is then quantitated by successive incubations with Europium-streptavidin and Europium fluorescence enhancing reagent in the Wallac DELFIA instrument (time-resolved fluorescence). An increased fluorescent signal over background indicates a phosphorylation by polypeptide of the present invention or a molecule induced by polypeptide of the present invention.

### Example 40

[1221] Assay for the Stimulation of Bone Marrow CD34+ Cell Proliferation

[1222] This assay is based on the ability of human CD34+ to proliferate in the presence of hematopoietic growth factors and evaluates the ability of isolated polypeptides expressed in mammalian cells to stimulate proliferation of CD34+ cells.

[1223] It has been previously shown that most mature precursors will respond to only a single signal. More immature precursors require at least two signals to respond. Therefore, to test the effect of polypeptides on hematopoietic activity of a wide range of progenitor cells, the assay contains a given polypeptide in the presence or absence of other hematopoietic growth factors. Isolated cells are cultured for 5 days in the presence of Stem Cell Factor (SCF) in combination with tested sample. SCF alone has a very limited effect on the proliferation of bone marrow (BM) cells, acting in such conditions only as a “survival” factor. However, combined with any factor exhibiting stimulatory effect on these cells (e.g., IL-3), SCF will cause a synergistic effect. Therefore, if the tested polypeptide has a stimulatory effect on a hematopoietic progenitors, such activity can be easily detected. Since normal BM cells have a low level of cycling cells, it is likely that any inhibitory effect of a given polypeptide, or agonists or antagonists thereof, might not be detected. Accordingly, assays for an inhibitory effect on progenitors is preferably tested in cells that are first subjected to in vitro stimulation with SCF+IL+3, and then contacted with the compound that is being evaluated for inhibition of such induced proliferation.

[1224] Briefly, CD34+ cells are isolated using methods known in the art. The cells are thawed and resuspended in medium (QBSF 60 serum-free medium with 1% L-glutamine (500 ml) Quality Biological, Inc., Gaithersburg, Md. Cat# 160-204-101). After several gentle centrifugation steps at 200× g, cells are allowed to rest for one hour. The cell count is adjusted to 2.5×10⁵ cells/ml. During this time, 100 μl of sterile water is added to the peripheral wells of a 96-well plate. The cytokines that can be tested with a given polypeptide in this assay is rhSCF (R&D Systems, Minneapolis, MN, Cat# 255-SC) at 50 ng/ml alone and in combination with rhSCF and rhIL-3 (R&D Systems, Minneapolis, Minn., Cat# 203-ML) at 30 ng/ml. After one hour, 10 μl of prepared cytokines, 50 μl of the supernatants prepared in Example 30 (supernatants at 1:2 dilution=50 μl) and 20 μl of diluted cells are added to the media which is already present in the wells to allow for a final total volume of 100 μl. The plates are then placed in a 37° C./5% C0₂ incubator for five days.

[1225] Eighteen hours before the assay is harvested, 0.5 μCi/well of [3H] Thymidine is added in a 10 μl volume to each well to determine the proliferation rate. The experiment is terminated by harvesting the cells from each 96-well plate to a filtermat using the Tomtec Harvester 96. After harvesting, the filtermats are dried, trimmed and placed into OmniFilter assemblies consisting of one OmniFilter plate and one OmniFilter Tray. 60 μl Microscint is added to each well and the plate sealed with TopSeal-A press-on sealing film A bar code 15 sticker is affixed to the first plate for counting. The sealed plates is then loaded and the level of radioactivity determined via the Packard Top Count and the printed data collected for analysis. The level of radioactivity reflects the amount of cell proliferation.

[1226] The studies described in this example test the activity of a given polypeptide to stimulate bone marrow CD34+ cell proliferation. One skilled in the art could easily modify the exemplified studies to test the activity of polynucleotides (e.g., gene therapy), antibodies, agonists, and/or antagonists and fragments and variants thereof. As a nonlimiting example, potential antagonists tested in this assay would be expected to inhibit cell proliferation in the presence of cytokines and/or to increase the inhibition of cell proliferation in the presence of cytokines and a given polypeptide. In contrast, potential agonists tested in this assay would be expected to enhance cell proliferation and/or to decrease the inhibition of cell proliferation in the presence of cytokines and a given polypeptide.

[1227] The ability of a gene to stimulate the proliferation of bone marrow CD34+ cells indicates that polynucleotides and polypeptides corresponding to the gene are useful for the diagnosis and treatment of disorders affecting the immune system and hematopoiesis. Representative uses are described in the “Immune Activity” and “Infectious Disease” sections above, and elsewhere herein.

### Example 41

[1228] Assay for Extracellular Matrix Enhanced Cell Response (EMECR)

[1229] The objective of the Extracellular Matrix Enhanced Cell Response (EMECR) assay is to identify gene products (e.g., isolated polypeptides) that act on the hematopoietic stem cells in the context of the extracellular matrix (ECM) induced signal.

[1230] Cells respond to the regulatory factors in the context of signal(s) received from the surrounding microenvironment. For example, fibroblasts, and endothelial and epithelial stem cells fail to replicate in the absence of signals from the ECM. Hematopoietic stem cells can undergo self-renewal in the bone marrow, but not in in vitro suspension culture. The ability of stem cells to undergo self-renewal in vitro is dependent upon their interaction with the stromal cells and the ECM protein fibronectin (fn). Adhesion of cells to fn is mediated by the α₅.β₁ and α₄.β₁ integrin receptors, which are expressed by human and mouse hematopoietic stem cells. The factor(s) which integrate with the ECM environment and responsible for stimulating stem cell self-renewal has not yet been identified. Discovery of such factors should be of great interest in gene therapy and bone marrow transplant applications

[1231] Briefly, polystyrene, non tissue culture treated, 96-well plates are coated with fn fragment at a coating concentration of 0.2 μg/ cm². Mouse bone marrow cells are plated (1,000 cells/well ) in 0.2 ml of serum-free medium. Cells cultured in the presence of IL-3 (5 ng/ml ) +SCF (50 ng/ml ) would serve as the positive control, conditions under which little self-renewal but pronounced differentiation of the stem cells is to be expected. Gene products of the invention (e.g., including, but not limited to, polynucleotides and polypeptides of the present invention, and supernatants produced in Example 30), are tested with appropriate negative controls in the presence and absence of SCF(5.0 ng/ml), where test factor supernates represent 10% of the total assay volume. The plated cells are then allowed to grow by incubating in a low oxygen environment (5% CO₂, 7% O₂, and 88% N₂) tissue culture incubator for 7 days. The number of proliferating cells within the wells is then quantitated by measuring thymidine incorporation into cellular DNA. Verification of the positive hits in the assay will require phenotypic characterization of the cells, which can be accomplished by scaling up of the culture system and using appropriate antibody reagents against cell surface antigens and FACScan.

[1232] One skilled in the art could easily modify the exemplified studies to test the activity of polynucleotides (e.g., gene therapy), antibodies, agonists, and/or antagonists and fragments and variants thereof.

[1233] If a particular polypeptide of the present invention is found to be a stimulator of hematopoietic progenitors, polynucleotides and polypeptides corresponding to the gene encoding said polypeptide may be useful for the diagnosis and treatment of disorders affecting the immune system and hematopoiesis. Representative uses are described in the “Immune Activity” and “Infectious Disease” sections above, and elsewhere herein. The gene product may also be useful in the expansion of stem cells and committed progenitors of various blood lineages, and in the differentiation and/or proliferation of various cell types.

[1234] Additionally, the polynucleotides and/or polypeptides of the gene of interest and/or agonists and/or antagonists thereof, may also be employed to inhibit the proliferation and differentiation of hematopoietic cells and therefore may be employed to protect bone marrow stem cells from chemotherapeutic agents during chemotherapy. This antiproliferative effect may allow administration of higher doses of chemotherapeutic agents and, therefore, more effective chemotherapeutic treatment.

[1235] Moreover, polynucleotides and polypeptides corresponding to the gene of interest may also be useful for the treatment and diagnosis of hematopoietic related disorders such as, for example, anemia, pancytopenia, leukopenia, thrombocytopenia or leukemia since stromal cells are important in the production of cells of hematopoietic lineages. The uses include bone marrow cell ex-vivo culture, bone marrow transplantation, bone marrow reconstitution, radiotherapy or chemotherapy of neoplasia.

### Example 42

[1236] Human Dermal Fibroblast and Aortic Smooth Muscle Cell Proliferation

[1237] The polypeptide of interest is added to cultures of normal human dermal fibroblasts (NHDF) and human aortic smooth muscle cells (AoSMC) and two co-assays are performed with each sample. The first assay examines the effect of the polypeptide of interest on the proliferation of normal human dermal fibroblasts (NHDF) or aortic smooth muscle cells (AoSMC). Aberrant growth of fibroblasts or smooth muscle cells is a part of several pathological processes, including fibrosis, and restenosis. The second assay examines IL6 production by both NHDF and SMC. IL6 production is an indication of functional activation. Activated cells will have increased production of a number of cytokines and other factors, which can result in a proinflammatory or immunomodulatory outcome. Assays are run with and without co-TNFa stimulation, in order to check for costimulatory or inhibitory activity.

[1238] Briefly, on day 1, 96-well black plates are set up with 1000 cells/well (NHDF) or 2000 cells/well (AOSMC) in 100 μ culture media. NHDF culture media contains: Clonetics FB basal media, 1 mg/ml hFGF, 5 mg/ml insulin, 50mg/ml gentamycin, 2%FBS, while AoSMC culture media contains Clonetics SM basal media, 0.5 μg/ml hEGF, 5mg/ml insulin, 1 μg/ml hFGF, 50 mg/ml gentamycin, 50 μg/ml Amphotericin B, 5% FBS. After incubation at 37° C. for at least 4-5 hours, culture media is aspirated and replaced with growth arrest media. Growth arrest media for NHDF contains fibroblast basal media, 50 mg/ml gentamycin, 2% FBS, while growth arrest media for AoSMC contains SM basal media, 50 mg/ml gentamycin, 50 μg/ml Amphotericin B, 0.4% FBS. Incubate at 37° C. until day 2.

[1239] On day 2, serial dilutions and templates of the polypeptide of interest are designed such that they always include media controls and known-protein controls. For both stimulation and inhibition experiments, proteins are diluted in growth arrest media. For inhibition experiments, TNFa is added to a final concentration of 2ng/ml (NHDF) or 5ng/ml (AoSMC). Add ⅓ vol media containing controls or polypeptides of the present invention and incubate at 37° C./5% CO₂ until day 5.

[1240] Transfer 60 μl from each well to another labeled 96-well plate, cover with a plate-sealer, and store at 4° C. until Day 6 (for IL6 ELISA). To the remaining 100 μl in the cell culture plate, aseptically add Alamar Blue in an amount equal to 10% of the culture volume (10 μl). Return plates to incubator for 3 to 4 hours. Then measure fluorescence with excitation at 530 nm and emission at 590 nm using the CytoFluor. This yields the growth stimulation/inhibition data.

[1241] On day 5, the IL6 ELISA is performed by coating a 96 well plate with 50-100 μl/well of Anti-Human IL6 Monoclonal antibody diluted in PBS, pH 7.4, incubate ON at room temperature.

[1242] On day 6, empty the plates into the sink and blot on paper towels. Prepare Assay Buffer containing PBS with 4% BSA. Block the plates with 200 μl/well of Pierce Super Block blocking buffer in PBS for 1-2 hr and then wash plates with wash buffer (PBS, 0.05% Tween-20). Blot plates on paper towels. Then add 50 μl/well of diluted Anti-Human IL-6 Monoclonal, Biotin-labeled antibody at 0.50 mg/ml. Make dilutions of IL-6 stock in media (30, 10, 3, 1, 0.3, 0 ng/ml). Add duplicate samples to top row of plate. Cover the plates and incubate for 2 hours at RT on shaker. Plates are washed with wash buffer and blotted on paper towels. Dilute EU-labeled Streptavidin 1:1000 in Assay buffer, and add 100 μl/well. Cover the plate and incubate 1 h at RT. Plates are again washed with wash buffer and blotted on paper towels. Add 100 μl/well of Enhancement Solution and shake for 5 minutes. Read the plate on the Wallac DELFIA Fluorometer. Readings from triplicate samples in each assay are tabulated and averaged.

[1243] A positive result in this assay suggests AoSMC cell proliferation and that the polypeptide of the present invention may be involved in dermal fibroblast proliferation and/or smooth muscle cell proliferation. A positive result also suggests many potential uses of polypeptides, polynucleotides, agonists and/or antagonists of the polynucleotide/polypeptide of the present invention which gives a positive result. For example, inflammation and immune responses, wound healing, and angiogenesis, as detailed throughout this specification. Particularly, polypeptides of the present invention and polynucleotides of the present invention may be used in wound healing and dermal regeneration, as well as the promotion of vasculargenesis, both of the blood vessels and lymphatics. The growth of vessels can be used in the treatment of, for example, cardiovascular diseases. Additionally, antagonists of polypeptides and polynucleotides of the invention may be useful in treating diseases, disorders, and/or conditions which involve angiogenesis by acting as an anti-vascular (e.g., anti-angiogenesis). These diseases, disorders, and/or conditions are known in the art and/or are described herein, such as, for example, malignancies, solid tumors, benign tumors, for example hemangiomas, acoustic neuromas, neurofibromas, trachomas, and pyogenic granulomas; artheroscleric plaques; ocular angiogenic diseases, for example, diabetic retinopathy, retinopathy of prematurity, macular degeneration, corneal graft rejection, neovascular glaucoma, retrolental fibroplasia, rubeosis, retinoblastoma, uvietis and Pterygia (abnormal blood vessel growth) of the eye; rheumatoid arthritis; psoriasis; delayed wound healing; endometriosis; vasculogenesis; granulations; hypertrophic scars (keloids); nonunion fractures; scleroderma; trachoma; vascular adhesions; myocardial angiogenesis; coronary collaterals; cerebral collaterals; arteriovenous malformations; ischemic limb angiogenesis; Osler-Webber Syndrome; plaque neovascularization; telangiectasia; hemophiliac joints; angiofibroma; fibromuscular dysplasia; wound granulation; Crohn's disease; and atherosclerosis. Moreover, antagonists of polypeptides and polynucleotides of the invention may be useful in treating anti-hyperproliferative diseases and/or anti-inflammatory known in the art and/or described herein.

[1244] One skilled in the art could easily modify the exemplified studies to test the activity of polynucleotides (e.g., gene therapy), antibodies, agonists, and/or antagonists and fragments and variants thereof.

### Example 43

[1245] Cellular Adhesion Molecule (CAM) Expression on Endothelial Cells

[1246] The recruitment of lymphocytes to areas of inflammation and angiogenesis involves specific receptor-ligand interactions between cell surface adhesion molecules (CAMs) on lymphocytes and the vascular endothelium. The adhesion process, in both normal and pathological settings, follows a multi-step cascade that involves intercellular adhesion molecule-1 (ICAM-1), vascular cell adhesion molecule-1 (VCAM-1), and endothelial leukocyte adhesion molecule- (E-selectin) expression on endothelial cells (EC). The expression of these molecules and others on the vascular endothelium determines the efficiency with which leukocytes may adhere to the local vasculature and extravasate into the local tissue during the development of an inflammatory response. The local concentration of cytokines and growth factor participate in the modulation of the expression of these CAMs.

[1247] Briefly, endothelial cells (e.g., Human Umbilical Vein Endothelial cells (HUVECs)) are grown in a standard 96 well plate to confluence, growth medium is removed from the cells and replaced with 100 μl of 199 Medium (10% fetal bovine serum (FBS)). Samples for testing and positive or negative controls are added to the plate in triplicate (in 10 μl volumes). Plates are then incubated at 37° C. for either 5 h (selectin and integrin expression) or 24 h (integrin expression only). Plates are aspirated to remove medium and 100 μl of 0.1% paraformaldehyde-PBS(with Ca++ and Mg++) is added to each well. Plates are held at 4° C. for 30 min. Fixative is removed from the wells and wells are washed 1× with PBS(+Ca,Mg)+0.5% BSA and drained. 10 μl of diluted primary antibody is added to the test and control wells. Anti-ICAM-1-Biotin, Anti-VCAM-1-Biotin and Anti-E-selectin-Biotin are used at a concentration of 10 Ig/mlI (1:10 dilution of 0.1 mg/ml stock antibody). Cells are incubated at 37° C. for 30 min. in a humidified environment. Wells are washed three times with PBS(+Ca,Mg)+0.5% BSA. 20 μl of diluted ExtrAvidin-Alkaline Phosphotase (1:5,000 dilution, refered to herein as the working dilution) are added to each well and incubated at 37° C. for 30 min. Wells are washed three times with PBS(+Ca,Mg)+0.5% BSA. Dissolve 1 tablet of p-Nitrophenol Phosphate pNPP per 5 ml of glycine buffer (pH 10.4). 100 μl of pNPP substrate in glycine buffer is added to each test well. Standard wells in triplicate are prepared from the working dilution of the ExtrAvidin-Alkaline Phosphotase in glycine buffer: 1:5,000 (10⁰) >10^{-0.5}>10⁻¹>10^{-1.5}. 5 μl of each dilution is added to triplicate wells and the resulting AP content in each well is 5.50 ng, 1.74 ng, 0.55 ng, 0.18 ng. 100 μl of pNNP reagent is then added to each of the standard wells. The plate is incubated at 37° C. for 4 h. A volume of 50 μl of 3M NaOH is added to all wells. The plate is read on a plate reader at 405 nm using the background subtraction option on blank wells filled with glycine buffer only. Additionally, the template is set up to indicate the concentration of AP-conjugate in each standard well [5.50 ng; 1.74 ng; 0.55 ng; 0.18 ng]. Results are indicated as amount of bound AP-conjugate in each sample.

### Example 44

[1248] Alamar Blue Endothelial Cells Proliferation Assay

[1249] This assay may be used to quantitatively determine protein mediated inhibition of bFGF-induced proliferation of Bovine Lymphatic Endothelial Cells (LECs), Bovine Aortic Endothelial Cells (BAECs) or Human Microvascular Uterine Myometrial Cells (UTMECs). This assay incorporates a fluorometric growth indicator based on detection of metabolic activity. A standard Alamar Blue Proliferation Assay is prepared in EGM-2MV with 10 ng /ml of bFGF added as a source of endothelial cell stimulation. This assay may be used with a variety of endothelial cells with slight changes in growth medium and cell concentration. Dilutions of the protein batches to be tested are diluted as appropriate. Serum-free medium (GIBCO SFM) without bFGF is used as a non-stimulated control and Angiostatin or TSP-1 are included as a known inhibitory controls.

[1250] Briefly, LEC, BAECs or UTMECs are seeded in growth media at a density of 5000 to 2000 cells/well in a 96 well plate and placed at 37-C overnight. After the overnight incubation of the cells, the growth media is removed and replaced with GIBCO EC-SFM. The cells are treated with the appropriate dilutions of the protein of interest or control protein sample(s) (prepared in SFM ) in triplicate wells with additional bFGF to a concentration of 10 ng/ ml. Once the cells have been treated with the samples, the plate(s) is/are placed back in the 37° C. incubator for three days. After three days 10 ml of stock alamar blue (Biosource Cat# DAL1100) is added to each well and the plate(s) is/are placed back in the 37° C. incubator for four hours. The plate(s) are then read at 530 nm excitation and 590 nm emission using the CytoFluor fluorescence reader. Direct output is recorded in relative fluorescence units.

[1251] Alamar blue is an oxidation-reduction indicator that both fluoresces and changes color in response to chemical reduction of growth medium resulting from cell growth. As cells grow in culture, innate metabolic activity results in a chemical reduction of the immediate surrounding environment. Reduction related to growth causes the indicator to change from oxidized (non-fluorescent blue) form to reduced (fluorescent red) form. i.e. stimulated proliferation will produce a stronger signal and inhibited proliferation will produce a weaker signal and the total signal is proportional to the total number of cells as well as their metabolic activity. The background level of activity is observed with the starvation medium alone. This is compared to the output observed from the positive control samples (bFGF in growth medium) and protein dilutions.

### Example 45

[1252] Detection of Inhibition of a Mixed Lymphocyte Reaction

[1253] This assay can be used to detect and evaluate inhibition of a Mixed Lymphocyte Reaction (MLR) by gene products (e.g., isolated polypeptides). Inhibition of a MLR may be due to a direct effect on cell proliferation and viability, modulation of costimulatory molecules on interacting cells, modulation of adhesiveness between lymphocytes and accessory cells, or modulation of cytokine production by accessory cells. Multiple cells may be targeted by these polypeptides since the peripheral blood mononuclear fraction used in this assay includes T, B and natural killer lymphocytes, as well as monocytes and dendritic cells.

[1254] Polypeptides of interest found to inhibit the MLR may find application in diseases associated with lymphocyte and monocyte activation or proliferation. These include, but are not limited to, diseases such as asthma, arthritis, diabetes, inflammatory skin conditions, psoriasis, eczema, systemic lupus erythematosus, multiple sclerosis, glomerulonephritis, inflammatory bowel disease, crohn's disease, ulcerative colitis, arteriosclerosis, cirrhosis, graft vs. host disease, host vs. graft disease, hepatitis, leukemia and lymphoma.

[1255] Briefly, PBMCs from human donors are purified by density gradient centrifugation using Lymphocyte Separation Medium (LSM®, density 1.0770 g/ml, Organon Teknika Corporation, West Chester, Pa.). PBMCs from two donors are adjusted to 2×10⁶ cells/ml in RPMI-1640 (Life Technologies, Grand Island, N.Y.) supplemented with 10% FCS and 2 mM glutamine. PBMCs from a third donor is adjusted to 2×10⁵ cells/ml. Fifty microliters of PBMCs from each donor is added to wells of a 96-well round bottom microtiter plate. Dilutions of test materials (50 μl) is added in triplicate to microtiter wells. Test samples (of the protein of interest) are added for final dilution of 1:4; rhuIL-2 (R&D Systems, Minneapolis, Minn., catalog number 202-IL) is added to a final concentration of 1 μg/ml; anti-CD4 mAb (R&D Systems, clone 34930.11, catalog number MAB379) is added to a final concentration of 10 μg/ml. Cells are cultured for 7-8 days at 37° C. in 5% CO₂, and 1 μC of [³H] thymidine is added to wells for the last 16 hrs of culture. Cells are harvested and thymidine incorporation determined using a Packard TopCount. Data is expressed as the mean and standard deviation of triplicate determinations.

[1256] Samples of the protein of interest are screened in separate experiments and compared to the negative control treatment, anti-CD4 mAb, which inhibits proliferation of lymphocytes and the positive control treatment, IL-2 (either as recombinant material or supernatant), which enhances proliferation of lymphocytes.

[1257] One skilled in the art could easily modify the exemplified studies to test the activity of polynucleotides (e.g., gene therapy), antibodies, agonists, and/or antagonists and fragments and variants thereof.

[1258] It will be clear that the invention may be practiced otherwise than as particularly described in the foregoing description and examples. Numerous modifications and variations of the present invention are possible in light of the above teachings and, therefore, are within the scope of the appended claims.

[1259] The entire disclosure of each document cited (including patents, patent applications, journal articles, abstracts, laboratory manuals, books, or other disclosures) in the Background of the Invention, Detailed Description, and Examples is hereby incorporated herein by reference. Further, the paper copy on CD-ROM of the sequence listing submitted herewith and the corresponding computer readable form on CD-ROM are both incorporated herein by reference in their entireties. Moreover, the hard copy of and the corresponding computer readable form of the Sequence Listing of Ser. No. 60/124,270 and International Application No. PCT/US00/05882 are also incorporated herein by reference in their entireties.

The application's sequence listing, which the Patent Office published only in electronic form, follows.

SEQUENCE LISTING (1694 sequences)

SEQ ID NO: 1 - DNA, 556 bp, Homo sapiens
  misc_feature (546): n equals a,t,g, or c
gaagagagactgggttattcctcccatcagctgcccagaaaatgaaaaaggcccatttcctaaaaacctggttcagatcaaatccaacaaagacaaagaaggcaaggttttctacagcatcactggccaaggagctgacacaccccctgttggtgtctttattattgaaagagaaacaggatggctgaaggtgacagagcctctggatagagaacgcattgccacatacactctcttctctcacgctgtgtcatccaacgggaatgcagttgaggatccaatggagattttgatcacggtaaccgatcagaatgacaacaagcccgaattcacccaggaggtctttaaggggtctgtcatggaaggtgctcttccaggaacctctgtaatggaggtcacagccacagacgcggacgatggatgtggaacacctacaatgccgccatcgcttacaccatcctcagcccaagatccctgagctccctgacaaaaatatgttcaccattaacaggaacacaggrgtcatcagtgttgtcaccacttggnttggccgaga

SEQ ID NO: 2 - DNA, 2662 bp, Homo sapiens
  misc_feature (2662): n equals a,t,g, or c
ggctgtgggaactcctgggggaggtggaggtggagccgtaccaggtatttcagccatgtcccgcggwgatctgwgccagagagccaaggatttgagtaaacggagcttctcaagtcagcggccaggcatggaacggcagaatcggcgccctggcccagggggcaaggctggcagcagtggcagcagcagtggaggaggcggtgggkgtcctggaggaaggaccgggccaggacgaggcgacaagaggagctggccctctcccaagaaccgaagtcgtcctccagaggarcgtcccccggggcttcccctgcctcccccacctcccagcagttctgctgcttccgcctggaccaagttatccacagcaaccctgctggcatccaacargctctggcccagcttagtarccgtcaarggagtgtaactgcaccagggggtcatccaaggcacaagcctgggcctccccaagcccctcagggcccctctcctaggcccccaacccgatacgagccccagagggtcaacagcggcctcagttctgacccccactttraggagccggggccaatggtgagaggggtgggtgggactcctcgggactctgccggggttagtccctttccccctaaacgtcgggagcggcctcccagaaaaccagagctgctacaggaggaatctttgccacctcctcatagctctggattcttgggctctaagcctgagggcccaggccctcaggcagagtccagagatacaggcacagaggccctgacccctcacatctggaaccgtttacatactgccactagccgaaagagttaccggcccagctccatggagccttggatggagcccctgagtccttttgaggatgtggctggcacagaaatgagtcagtctgacagtggggtggacctgagtggggattctcaggtgtcatcaggtccctgcagccagcgaagttcccctgatggaggactcaagggggcagcagagggaccccccaagaggcctggaggctcctcacccctgaatgctgttccttgtgagggtccacctggctctgaacctcctaggagaccaccacctgccccccacgatggggacagaaaggagctgccccgggagcagcctctgccccctggccccattggcacagaacgatcacagcrtacagaccgaggcacagagcctggccccattcggccatcccatcgacctggtcccccagtccagtttggcactartgacaaggactcagacttacgcctagtggtaggagacagcttgaaagcagagaaggagctaacagcatcagtcactgaggccattcctgtatcacgagactgggagctgcttcccagtgctgctgcctctgctgagccacaatccaagaacctggattctgggcactgtgtcccggagcccagctcctcaggccagcgcctgtatcctgaggttttctatggcagtgctgggccttccagttctcagatctctgggggagccatggactctcaattacatccaaacagtggaggcttccgccctgggacaccctcactgcacccttacagatcacagcccctatacctacccccsggcccagcccctccctcagcactgctctctggggtagctctcaagggccagtttctggatttctccacaatgcaagctacagagctggggaagttgccggctggaggagttctctaccctccaccttccttcctctactctccggctttctgccccagtcctttgcctgacacatcgttgcttcaggtacgccaggatctgccatccccttcggatttttattctactcctctgcagcctggtggccaaagtggctttctcccttcaggggctcctgccagcagatgcttctacccatggtagactcacagctgcctgtggtgaactttggctccctgccgccagcaccacctcctgccccacctcccctttctctgttacctgtgggccctgctctgcagccccccagcctggctgtgcggcccccacctgctcctgctactcgggtgctgccttcacctgccaggcccttccccgctagcttggggcgagcagagctgcatccagtggaactaaagccgttccaggattatcaaaaactgagcagcaaccttgggggacctggatcatcacggactcccccaactggaaggtccttctctggcctcaattcccgtctcaaggccacgccttccacctacagtggagtcttccgcacccagcgcgtcgacctttaccagcaggcctccccaccagatgccctgcgctggatacctaagccttgggarcggacagggccgccacctcgagaagggccctcccgacgggcagaggagcctgggtcccgaggggacaaggagcctgggttgcccccaccccgctgagggagttcctcttgccccctacccccggggcttgtatatagattataaatatataagggggaaaggggtgggcggggaggggttgtggggctggggcctcacttcccctcctcccccttcccctggtcccctgtccctggggctgtttgttaaaaaagagtaataaaaggatttaaaaaaaaaaaaaaaaaaaaaaaaaaaaaaaaaaaaaaaaaaaaaaaaaaaaaaaaaaaatn

SEQ ID NO: 3 - DNA, 338 bp, Homo sapiens
gtgctttgtgctttgtgcatgtggtaggcagaacactaccatatgtccccacatacttacactagaccttggagcaagagcaagaacagcaaaagcacagcgcttttgaacccaaaagacaagctcccttcttcctgcgttgtccctccagctscctctgctgaccaggtttagcatcatgtgctctgtaaaggaggaattctggagagtccagtccattattacagagctagtactgaagggtgagtttggagttgaagaggcaatgaaattgataactggcacagaagccaaatataagagtattgactaaataatagctaagtacaagaacacag

SEQ ID NO: 4 - DNA, 813 bp, Homo sapiens
  misc_feature (784): n equals a,t,g, or c
  misc_feature (787): n equals a,t,g, or c
  misc_feature (793): n equals a,t,g, or c
  misc_feature (807): n equals a,t,g, or c
aattcggcacgagccaccttgacctcctaaagtgctaggattacaggcatgagccactgtacccataccctgggagggttttgaagagtgacatgttatgatttaggttttagcacaaccccctcagaccactctgtggagaacagactgtcagggaacgtgggtggaggcagagagaccagaaagattccaggaggacagatgtggtgggacaaggttggggagacactgaagccaaggccctgatcacccatcctcacagctccagcctctcaactycagcctctctcacttattggttccatgtttgtccatcatgagcctcctcaacaagcccaagagtgagatgaccccagaggagctgcagaagcgagaggaggaggaatttaacaccggtccactctctgtgctcacacagtcagtcaagaacaatacccaagtgctcatcaactgccgcaacaataagaaactcctgggccgcgtgaaggccttcgataggcactgcaacatggtgctggagaacgtgaaggagatgtggactgaggtacccaagagtggcaagggcaagaagaagtccaagccagtcaacaaagaccgctacatctccaagatgttcctgcgcggggactcagtcatcgtggtcctgcggaacccgctcatcgccggcaagtaggggccgcctgtctgttgacagaactcactcctctgtcctatgaagaccgctgccattggtgttgagaataataaagctctgtgtttttttctaaaaaaaaaaaaaaaaaanytncgggcngaagctttttcccnttaggg

SEQ ID NO: 5 - DNA, 901 bp, Homo sapiens
  misc_feature (838): n equals a,t,g, or c
  misc_feature (846): n equals a,t,g, or c
  misc_feature (870): n equals a,t,g, or c
gcccgaatggcggccgacaagsgcccggcggctggacctcggtcgcgagctgccatggcccagtggaggaagaagaaagggctccggaagcgccgaggcgcggcctcccaggcccgcggcagcaactcggaggacggcgagtttgagatccaggcggaagatgacgcccgggcccggaagctgggacctggaagacccctgcccaccttccccacctcggaatgcacctcggatgtggagccggacacccgggagatggtgcgtgcccagaacaagaagaagaagaagtctggaggcttccagtccatgggcctgagctacccggtgttcaaaggcatcatgaagaaggggtacaaggtgccaacacccatccagaggaagaccatcccggtgatcttggatggcaaggacgtggtggccatggcccggacgggcagtggcaagacagcctgcttcctcctcccaatgttcgagcggctcaagacccacagtgcccagaccggggcccgcgcctcatcctctcgccgacccgagarctggccctgcagaccctgaagtwcactaaggagctaggcaagttcactggcctcaagactgccctgatcctgggtggagacaggatggaagaccagtttgcagccctgcacgaaaatcccgacataattattgccacgcccggacggttggtgcatgtggctgtggaaatragcctgaagctgcagagtgtggaatacgtrgtgttcgatgaagctgaccggctttttraaatgggtttcgcagagcagctgcaggagatcatcgcccgtctccccgggggccaccagacggtgctgttctncgccacgntgcccaaactgctggtggaatttncccgggctggcctcacggagcccgtgctcat

SEQ ID NO: 6 - DNA, 731 bp, Homo sapiens
  misc_feature (106): n equals a,t,g, or c
ggcacgagcgagctcagagtgtgcccgctgcgccgccgctgtccgtacctgccgccgccgccaccgccaccatgcccaacttcgccggcacctggaagatgcgcanagcgagaatttcgacgagctgctgaaggcactgggtgtgaacgccatgctgaggaaagtggccgtagcggctgcgtccaagccgcacgtggagatccgccaggacggggatcagttctacatcaagacatccaccacggtgcgcaccactgagatcaacttcaaggtcggagaaggctttgaggaggagaccgtggacggacgcaagtgcaggagtttagccacttgggagaatgagaacaagatccactgcacgcaaactcttcttgaaggggacggccccaaaacctactggacccgtgagctggccaacgatgaacttatcctgacgtttggcgccgatgacgtggtctgcaccagaatttatgtccgagagtgaaggcagctggcttgctcctactttcaggaagggatgcaggctcccctgaggaatatgtcatagttctgagctgccagtggaccgcccttttcccctaccaatattaggtgatcccgttttccccatgacaatgttgtagtgtcccccacccccaccccccaggccttggtgcctcttgtatccctagtgctccatagtttggcatttgcacggtttcgaagtcattaaactggttagacgtgtctca

SEQ ID NO: 7 - DNA, 2774 bp, Homo sapiens
  misc_feature (2652): n equals a,t,g, or c
  misc_feature (2698): n equals a,t,g, or c
  misc_feature (2714): n equals a,t,g, or c
  misc_feature (2756): n equals a,t,g, or c
ggcagagtcacctttgagtatttcagcctcttcatgaatctatctccctctctttgatttcatgtaatctctccttaaatatttctttgcatatgtgggcaagtgtacgtgtgtgtgtgtcatgtgtggcagaggggcttcctaacccctgcctgataggtgcagaacgtcggctatcagagcaagcattgtggagcggttmcttatgccaggctgccatgtgagatgatccaagaccaaaacaaggccctagactgcagtaaaacccagaactcaagtagggcagaaggtggaaggctcatatggwtagaaggcccaaagtataagacagatggtttgagacttgagacccgaggactaagatggaaagcccatgttccaagatagatagaagcctcaggcctgaaaccaacaaaagcctcaagagccaagaaaacagagggtggcctgaattggaccgaagcctgagttggatggaagtctcaaggcttgagttagaagtcttaagacctgggacaggacacatggaaggcctaagaactgagacttgtgacacaaggccaacgacctaagattagcccagggttgtagctggaagacctacaacccaaggatggaaggcccctgtcacaaagcctacctagatggatagaggacccaagcgaaaaaggtatctcaagactaacggccggaatctggaggcccatgacccagaacccaggaaggatagaagcttgaagacctggggaaatcccaagatgagaaccctaaaccctacctcttttctattgtttacacttcttactcttagatatttccagttctcctgtttatctttaagcctgattcttttgagatgtactttttgatgttgccggttacctttagattgacagtattatgcctgggccagtcttgagccagctttaaatcacagcttttacctatttgttaggctatagtgttttgtaaacttctgtttctattcacatcttctccacttgagagagacaccaaaatccagtcagtatctaatctggcttttgttaacttccctcaggagcagacattcatataggtgatactgtatttcagtcctttcttttgaccccagaagccctagactgagaagataaaatggtcaggttgttgggraaaaaaaagtgccaggctctctagagaaaaatgtgaagagatgctccaggccaatgagaagaattagacaagaaatacacagatgtgccagacttctgagaagcacctgccagcaacagcttccttctttgagcttaggtgagcaggattctggggtttgggatttctagtgatggttatggaaagggtgactgtgcctgggacaaagcgaggtcccaaggggacagcctgaactccctgctcatagtagtggccaaataatttggtggactgtgccaacgctactcctgggtttaatacccatctctaggcttaaagatgagagaacctgggactgttgagcatgtttaatactttccttgatttttttcttcctgtttatgtgggaagttgatttaaatgactgataatgtgtatgaaagcactgtaaaacataagagaaaaaccaattagtgtattggcaatcatgcagttaacatttgaaagtgcagtgtaaattgtgaagcattatgtaaatcaggggtccacagtttttctgtaaggggtcaaatcataaatactttagactgtgggccatatggtttctgttacatatttgttttttaaacaacgtttttataaggtcaaaatcattcttagtttttgagccaattggatttggcctgctgttcatagcttaccaccccctgatgtattatttgttattcagagaaaatttctgaatactactagtttccttttctgtgcctgtccctgtgctaggcactaaaaatgcaatgattattgatatctaggtgacctgaaaaaaaatagtgaatgtgctttgtaaactgtaaagcacttgtattctactgtgataagcgttgtggatacaaagaaaggagcaagcataaaaaagtgctctttcaaaaggatatagtactatgcagacacaaggaattgtttgataaatgaataaattatatgtatatttgaggccaatttgtgtttgctgctctggtaattttgagtaaaaatgcagtattccaggtatcagaaacgaaaacacatggaaactgcttttaaactttaaaatatactgaaaacataagggactaagcttgttgtggtcacctataatgtgccagataccatgctgggtgctagagctaccaaagggggaaaagtattctcatagaacaaaaaatttcagaaaggtgcatattaaagtgctttgtaaactaaagcatgatacaaatgtcaatgggctacatatttatgaatgaatgaatggatgaatgaatattaagtgcctcttacataccagctattttgggtactgtaaaatacaagattaattctcctatgtaataagaggaaagtttatcctctatactattcagatgtaaggaatgatatattgcttaattttaaacaatcaagactttactggtgaggttaagttaaattattactgatacatttttcccaggtaaccaggaagagctagtatgaggnaatgaaktaatarcttaracccaagttcccaagatcggccgaaccnggccgcctcctagganggattccccccgaagggggccccaagccttacgcgtggccanggcggacggtccaaaggc

SEQ ID NO: 8 - DNA, 2613 bp, Homo sapiens
  misc_feature (896): n equals a,t,g, or c
  misc_feature (1246): n equals a,t,g, or c
tcgacccacgcgtccgcccacgcgtccgtggcgaacgaggttatcaagtgcaaggctgcagttgcttgggaggctggaaagcctctctccatagaggagatagaggtggcacccccaaaggctcatgaagttcgaatcaagatcattgccactgcggtttgccacaccgatgcctataccctgagtggagctgatcctgagggttgttttccagtgatcttgggacatgaaggtgctggaattgtggaaagtgttggtgagggagttactaagctgaaggcgggtgacactgtcatcccactttacatcccacagtgtggagaatgcaaattttgtctaaatcctaaaactaacctttgccagaagataagagtcactcaagggaaaggattaatgccagatggtaccagcagatttacttgcaaaggaaagacaattttgcattacatgggaaccagcacattttctgaatacacagttgtggctgatatctctgttgctaaaatagatcctttagcacctttggataaagtctgccttctaggttgtggcatttcaaccggttatggtgctgctgtgaacactgccaagttggagcctggctctgtttgtgccgtctttggtctgggaggagtcggattggcagttatcatgggctgtaaagtggctggtgcttcccggatcattggtgtggacatcaataaagataaatttgcaagggccaaagagtttggagccactgaatgtattaaccctcaggattttagtaaacccatccaggaagtgctcattgagatgaccgatggaggagtggactattcctttgaatgtattggtaatgtgaaggtcatgagagcagcacttgaggcatgtcacaagggctggggcgtcacgtncgtggttggagtagctgcttcaggtgaagaaattgccactcgtccattccagctggtaacaggtcgcacatggaaaggcactgcctttggaggatggaagagtgtagaaagtgtcccaaagttggtgtctgaatatatgtccaaaaagataaaagttgatgaatttgtgactcacaatctgtcttttgatgaaatcaacaaagcctttgaactgatgcattctggaaagagcattcgaactgttgtaaagatttaattcaaaagagaaaaataatgtccatcctgtcgtgatgtgataggagcagcttaacaggcagggagaagcgcctccaacctcacagcctcgtagnrcttcacagctactccagaaaatagggttatgtgtgtcattcatgaatctctataatcaaggacaaggataattcagtcatgaacctgttttctggatgctcctccacataaataattgctagtttattaaggaatattttaacataataaaagtaatttctacatttgtgtggaaattgtcttgttttatgctgtcatcattgtcacggtttgtctgcccattatcttcattctgcaagggaaagggaaaggaagcagggcagtggtgggtgtctgaaacctcagaaacataacgttgaacttttaagggtctcagtccccgttgattaaagaacagatcctagccatcagtgacaaagttaatcaggacccaagtctgcttctgtgatattatctttaagggaggtactgtgccttgttcatacctgtaccccaaattcctaggatggcatctgcccttcagggggcactaaaatgtattattgaaacagcattctgggcttaaataggtgtatgtatgtgttggttgtgactgtactatttctagtatagtgaactacatactgaatatccaagttctcagcacctacttttgtcaaatcttaacattttgccacttcgagatcacattgccattcctcccctccagaggtaacaattatccacaatttgatgtttatcattcctgtgttgttgtactttcactgtgtataacctaaaccatctactctttagtactgttttatatatttttaagcctcatacttgctcattctacagcttttttcactcattattgtataattatatctgaagctctcgttcattaattttagtcctgtgtagcagaattcaattacgggaactaccataatttatctgttctccagttgaaggcatgaagttgttgccagtttctgtattataacactgtagtggaacattcttctgcattgggctcwctgcgtgttacctaagacgtatcacagaataaacacatttagccttatagacattgccaaattgctcttcaaagtaaatgtgagtttttgtgaattacatgagtatggaatggtgttttattatgactttagtttgcattttcctcaattctcgttaaatccttcattctaatggacattttattgtgaagaacctgttcatatcctgtgctcaactttgtattgaattatttttctctgaataatttttaggagttcttttattctagacatcaatcatttgtcagttttatatgttgcaaatatcttctagtctatcttgtgacttttctttttactttatggtattttgttgaataaagttttaatgtagtcacataaaaaaaaaaaaaaaaaaaaaaaaa

SEQ ID NO: 9 - DNA, 1101 bp, Homo sapiens
  misc_feature (730): n equals a,t,g, or c
  misc_feature (983): n equals a,t,g, or c
  misc_feature (1055): n equals a,t,g, or c
gtcggcacgcccttcgggacgagctggaggcagagcgtgagtacaaagtgatcggcctcggccgcacgcagtagcccccctactccccggccaagtcagggcctccctcttcccgcggagtcgcaaccacgggtagctcgtgtaggtaacggcaggtccaggcctccgcatgagcgagggccccccgcgcgaccttgaatggcccgggcgcgcgcggtcgtgtgggagttgtagtcctccgtccccgtccgcgcggactccgtttcccgtggtgccccgggcggcccgcttccggcgcagttagttacgagtcggcgcacgcggcctcggtccggttgactttgcggaccatggagggcggcttcggctccgatttcgggggctccggcagcgggaagctggacccagggctcataatggagcaggtgaaagtgcagatcgccgtggccaacgcgcaggagctgctgcagaggatgacggacaagtgtttccggaagtgtatagggaaacctgggggctccctggacaactccgagcagaagtgcatcgccatgtgcatggaccgctacatggacgcctggaacaccgtgtctcgcgcctacaactcgcggctgcagcgggaacgagccaacatgtgaccggcgagcgcgggccaccccaccctgttcatttccataaacgtgctttgagaggcggggtccgcatgtacgtactgcctgcccggggcttnaggagggtggcaccggtgctgggacasacgggactgtgtcctcgccaccccccgccctgccccctgccagccagtgcagyttggatctcgggggtgtggggccctgtgccttcctgaagtgctggcagccagtggcacctccttcaggcmtttggggkattcccctagtgtgcccaagtcagcctcatattctgggcggacagcttgtctggacttcggagttgggggtggtcagacaccacaggagctgtcnacctctgcggatgggcaaataaattggtggaggacggagaraaacctctttatttccctcctgaggggtctntgggaagaggtgacgcgtgtccctggaaccccagctcggagggtct

SEQ ID NO: 10 - DNA, 1373 bp, Homo sapiens
  misc_feature (1364): n equals a,t,g, or c
  misc_feature (1373): n equals a,t,g, or c
ggattcccgggtcgacccacgcgtccgagccatcattgccaagaccttcaagggccgagggatcacgggggtagaagataaggagtcttggcatgggaagcccctccccaaaaacatggctgagcagatcatccaggagatctacagccagatccagagcaaaaagaagatcctggcaacccctccacaggaggacgcaccctcagtggacattgccaacatccgcatgcccagcctgcccagctacaaagttggggacaagatagccacccgcaaggcctacgggcaggcactggccaagctgggccatgccagtgaccgcatcatcgccctggatggggacaccaaaaattccaccttctcggagatcttcaaaaaggagcacccggaccgcttcatcgagtgctacattgctgagcagaacatggtgagcatcgcggtgggctgtgccacccgcaacaggacggtgcccttctgcagcacttttgcagccttcttcacgcgggcctttgaccagattcgcatggccgccatctccgagagcaacatcaacctctgcggctcccactgcggcgtttccatcggggaagacgggccctcccagatggccctagaagatctggctatgtttcggtcagtccccacatcaactgtcttttacccaagtgatggcgttgctacagagaaggcagtggaactagccgccaatacaaagggtatctgcttcatccggaccagccgcccagaaaatgccatcatctataacaacaatgaggacttccaggtcggacaagccaaggtggtcctgaagagcaaggatgaccaggtgaccgttatcggggctggggtgaccctgcacgaggccttggccgctgccgaactgctgaagaaagaaaagatcaacatccgcgtgctggaccccttcaccatcaagcccctggacagaaaactcattctcgacagcgctcgtgccaccaagggcaggatcctcaccgtggaggaccattattatgaaggtggcattggtgaggctgtgtccagtgcagtagtgggcgagcctggcatcactgtcacccacctggcagttaaccgggtaccaagaagtgggaagccggctgagctgctgaagatgtttggtatcgacagggatgccattgcacaagctgtgaggggcctcatcaccaaggcctagggcgggtatgaagtgtggggcgggggtctatacattcctgagattctgggaaaggtgctcaaagatgtactgagaggaggggtaaatatatgttttgagaaaaatgaaaaaaaaaaaaaaaaaaaaaaaaaaaaaaaaaaaaaaaaaaaaaaaaaaaaaaaaaaaaaaaaanaaaaaaaan

SEQ ID NO: 11 - DNA, 3804 bp, Homo sapiens
tcgacccacgcgtccgcaaagctgaagtcggctaggtttgcaaagctgtgggctgagcactcaggcaatcacactctcagaaactgcggcggctctggactgcagcctcccaaggctccatgccagacaaagcatgcgtgtcacacttgctacaatagcctggatggtttcttttgtctccaattattcacacacagcaaatattttgccagatatcgaaaatgaagatttcatcaaagactgcgttcgaatccataacaagttccgatcagaggtgaaaccaacagccagtgatatgctatacatgacttgggacccagcactagcccaaattgcaaaagcatgggccagcaattgccagttttcacataatacacggctgaagccaccccacaagctgcacccaaacttcacttcactgggagagaacatctggactgggtctgtgcccattttttctgtgtcttccgccatcacaaactggtatgacgaaatccaggactatgacttcaagactcggatatgcaaaaaagtctgtggccactacactcaggttgtttgggcagatagttacaaagttggctgcgcagttcaattttgccctaaagtttctggctttgacgctctttccaatggagcacattttatatgcaactacggaccaggagggaattacccaacttggccatataagagaggagccacctkcagtgcctgccccaataatgacaagtgtttggacaatctctgtgttaaccgacagcgagaccaagtcaaacgttactactctgttgtatatccaggctggcccatatatccacgtaacagatacacttctctctttctcattgttaattcagtaattctaatactgtctgttataattaccattttggtacagcacaagtaccctaatttagttcttttggactaatacaattcaggaaagaaaaaacccaaaaaccaacctcattcacatatggctttttttttaaccaataacaattaggtgtacttctattttaaaacatttcagaaaaaaatatatgttatagcaatactcttactcaaaagaagaaatttcctaactctatcagataaactcatctttagtataaataagcattatttgcaggttgccacaggtggacttttagtaagtaacctaacccatgtttcagcttctaaatctgcaaaatgagcarggtacagtagcacatttttaggtgattcttagtaactccagtagccttcattagttaaaaacattattattttttgcatgctgcttcgactctaaatatctggttttccctgtctttttggtttactacttccccagattcagaacagaggagtaactaggggatctgattttagaggccttaattttctgttcatggactgttaaaagtaaaaccaaactttcaaaagggataaacctaaatatttacttgttatcattagagagggaacatcaaatgctgggacatcattactaaccaatagcatcagacactggatttaatggataatcacaatggtcgtaatgtatacaaagacatatataccackttctagtataaatttttcaaaaaatacaataataatataatttataaagaacactcttctatgaacaaccaccaccaccaaaaaagaaaaagccctcagaaaatttctcacaaataaggcaactaatgcctgatatctcaaaatcctttacaaaaggagatagttctagtcaaggagttttgggtatgttacttttttttcttctttttcttttcatctgcctccatcttaagtgcaatttcttcagctgtaagagctcccagtttcttattctttgctttcttaaccttttccttgatgctggccacatcaattttagtttcagtagaagctagacaaattaaaagcacaacacatgtaatactttagattttaccaagtaaaacaaagaatatatgtttaacaaagaatatatgtttaaggcagttaacttcagagtattcttataattgaataattgaaagrtgatcacagtataaaatataaaaacacttgcctaaagcagttagaaatttcttcagattaagataaaacaaatcataaaatactttatatattagtacaagtatacataaaaatggcmtaaatggcataattgaaccaattactggattcaactatattaagactatttccttaaatcctacttcagactaaattattttacctacattcttttccatattttggaacttctgagtcattattttccaycttgcacattaaaataatttaaaattacatgtatcccttctcaataagtttaatcagctaaccctaagctagaggtcaaaatctacttcctctaatatcaaaacgaaaatttaaagttttccaaatattaattcaatattaattgaatattcaatgaattcatttaatgttagattaattcattgaatattaattcratgaatgactaattaatagtattttaacaagattttggtatatttaacaacattttggtaataaagacaataatttgagagtgtgtggaagtccccctaatagaagccaactatctaatcaatgccaaaagtgtgaacaaaatagagaaaggaagcagtgaaaaagaatgcaactttttcttaccattcaaagtacaggatcacagcataaaagaatcataagataaaacatcaaactacccagcaacctgagaagcacagagtgttaaagcctccaccgtgtggagaaactaaattagggtaactagctattgagtatattgagtaccttcaaagcactcaactgacaggttttacagactggaaattataatacttatgacatttctaccttttatataaccaataatctaccatagaatgtagtattyttaaagctattaacaagcaatatattaaaataataatgtattatatctgtttctgacccagtctatgtacaatattgctggtgagccctctcccttcagtgtgtcactgttgcactttggagggttactttaggaagaggataagtgttaccacaggggaaaaaaatgcagaagaggatgcatcagaagaaatggcatgacaatgttttctcttagtgtcttttaaatactaggttagtgcgaaagtgatttctgccatttaaaaaccacaatcactttcgcactaatagctcctgaataagacctgtcagcatcctttagtctaaggtgatgagaaatccatgttaccgatatagaagccaaactctaagccaagatcacataaagagaagaaaaagtacaacttctgataattcctctttgagaggcatgacagcagagctcagggatcttcttgcatttctacagaagatgcactggctgccctgggtttgtatctttcacaacaaagagtcttttccaagcacagaccagaggtcaggagaggactgtcaatccagtttgcactgaaataggcattagctgcctctaaattataaattatctcagccatcccttgtccttaggrttagtaattaatgaaatgctaagagaactgatgaaaagatacaactgtttcttaaaaagattcagacaaatttattatgggtttacttttcctaattaataaagacttttacatcatagaaagcattaccttccttaggtttcacaattggtttttccttaggtggaataaatgctttgtttctttcctcttgtctcttactgatggcttctgcttgtttagcctacattaataaataaaaaatatatcagttaaatgt

SEQ ID NO: 12 - DNA, 2157 bp, Homo sapiens
  misc_feature (806): n equals a,t,g, or c
  misc_feature (846): n equals a,t,g, or c
  misc_feature (1517): n equals a,t,g, or c
  misc_feature (2110): n equals a,t,g, or c
  misc_feature (2116): n equals a,t,g, or c
  misc_feature (2137): n equals a,t,g, or c
  misc_feature (2150): n equals a,t,g, or c
gcgcacggttcactcccgctgtatattaaggcgccggcgakcgcggcctgaggctgctcccggacaagggcaacgagcgtttcgtttggacttctcgacttgagtgcccgcctccttcgccgccgcctctgcagtcctcagcgcagtctttccacaggagccagcatacttcctgaacatggagagtgttgttcgccgctgcccattcttatcccgagtcccccaggcctttctgcagaaagcaggcaaatctctgttgttctatgcccaaaactgccccaagatgatggaagttggggccaagccagcccctcgggcattgtccactgcagcagtacactaccaacagatcaaagaaacccctccggccagtgagaaagacaaaactgctaaggccaaggtccaacagactcctgatggatcccagcagagtccagatggcacacagcttccgtctggacaccccttgcctgccacaagccagggcactgcaagcaaatgccctttcctggcagcacagatgaatcagagaggcagcagtgtcttctgcaaagccagtcttgagcttcaggaggatgtgcaggaaatgaatgccgtgaggaaagaggttgctgaaacctcagcaggccccagtgtggttagtgtgaaaaccgatggaggggatcccagtggactgctgaagaacttccaggacatyatgcaaaagcaaagaccagaaagagtgtctcatcttcttcaagataacttgccaaaatctgtttccacttttcagtatgatcgtttctttgagaaaaaaattgatgagnaaaaagaatgaccacacctatcgagtttttaaaactgtgnaaccggcgagcacacatcttccccatggcagatgactattcagactccctcatcaccaaaaagcaagtgtcagtctggtgcagtaatgactacctaggaatgagtcgccacccacgggtgtgtggggcagttatggacactttgaaacaacatggtgctggggcaggtggtactagaaatatttctggaactagtaaattccatgtggacttagagcgggagctggcagacctccatgggaaagatgccgcactcttgttttcctcgtgctttgtggccaatgactcaaccctcttcaccctggctaagatgatgccaggctgtgagatttactctgattctgggaaccatgcctccatgatccaagggattcgaaacagccgagtgccaaagtacatcttccgccacaatgatgtcagccacctcagagaactgctgcaaagatctgacccctcagtccccaagattgtggcatttgaaactgtccattcaatggatggggcggtgtgcccactggaagagctgtgtgatgtggcccatgagtttggagcaatcaccttcgtggatgaggtccacgcagggggctttatggggctcgaggcggagggattggggatcgggatggagtcatgccaaaaatggacatcatttctggaacacttggcaaagcntttggttgtkttggagggtacatcgccagcacgagttctctgattgacaccgtacggtcctatgctgctggcttcatcttcaccacctctctgccacccatgctgctggctggagccctggagtctgtgcggatcctgaagagcgctgagggacgggtgcttcgccgccagcaccagcgcaacgtcaaactcatgagacagatgctaatggatgccggcctccctgttgtccactgccccagccacatcatccctgtgcgggttgcagatgctgctaaaaacacagaagtctgtratgaactaatgagcagacataacatctacgtgcaagcaatcaattaccctacggtgccccggggagaagagctcctacggattgcccccacccctcaccacacaccccagatgatgaactacttccttgagaatctgctagtcacatggaagcaagtggggctgggaactgaagcctcattccttcagctggagtggcaatttcttgcarggagggccaytgcatttgaagtgatgagtgaaagagagaagtyctatttttcttcagggttttgaggcaagtttgggtattctggttnagggcntgaggcattggaccttcattntttttcaatttanaccccag

SEQ ID NO: 13 - DNA, 1117 bp, Homo sapiens
  misc_feature (1102): n equals a,t,g, or c
ggcagagcctggactcccgtgagctggaaggaacagatttaatatctaggggctgggtatccccacatcactcatttggggggtcaagggacccgggcaatatagtattctgctcagtgtctggagatcatctacccaggctggggcttctgggacaggcgaggacccacggaccctggaagagctggtccaggggactgaactcccggcatctttacagagcagagcatgatcacattcctgccgctgctgctggggctcagcctgggctgcacaggagcaggtggcttcgtggcccatgtggaaagcacctgtctgttggatgatgctgggactccaaaggatttcacatactgcatctccttcaacaaggatctgctgacctgctgggatccagaggagaataagatggccccttgcgaatttggggtgctgaatagcttggcgaatgtcctctcacagcacctcaaccaaaaagacaccctgatgcagcgcttgcgcaatgggcttcagaattgtgccacacacacccagcccttctggggatcactgaccaacaggacacggccaccatctgtgcaagtagccaaaaccactccttttaacacgagggagcctgtgatgctggcctgctatgtgtggggcttctatccagcagaagtgactatcacgtggaggaagaacgggaagcttgtcatgcctcacagcagtgcgcacaagactgcccagcccaatggagactggacataccagaccctctcccatttagccttaaccccctcttacggggacacttacacctgtktggtagagcacattggggctcctgagcccatccttcgggactggacacctgggctgtcccccatgcagaccctgaaggtttctgtgtctgcagtgactctgggcctgggcctcatcatcttctctcttggtgtgatcagctggcggagagctggccactctagttacactcctcttcctgggtccaattattcagaaggatggcacatttcctagaggcagaatctacaacttccactccaagtgagaaggagrttcaaactcaatgrtgstaccawgcctctccaacatcttcaancccctgacattattt

SEQ ID NO: 14 - DNA, 885 bp, Homo sapiens
  misc_feature (869): n equals a,t,g, or c
  misc_feature (884): n equals a,t,g, or c
gtggtggctcgtttcatccgcatctacccactcacctggaatggcagcctgtgcatgcgcctggaggtgctggggtgctctgtggcccctgtctacagctactacgcacagaatgaggtggtggccaccgatgacctggatttccggcaccacagctacaaggacatgcgccagctcatgaaggtggtgaacgaggagtgccccaccatcacccgcacttacagcctgggcaagagctcacgaggcctcaagatctatgccatggagatctcagacaaccctggggagcatgaactgggggagcccgagttccgctacactgctgggatccatggcaacgaggtgctgggccgagagctgttgctgctgctcatgcagtacctgtgccgagagtaccgcgatgggaacccacgtgtgcgcagctggtgcaggacacacgcatccacctggtgccctcactgaaccctgatggctacgaggtggcagcgcagatgggctcagagtttgggaactgggcgctgggactgtggactgaggagggctttgacatctttgaagatttcccggatctcaactctgtgctctggggagctgaggagaggaaatgggtcccctaccgggtccccaacaataacttgcccatccctgaacgctacctttcgccagatgccacggtatccacggaggtccgggccatcattgcctggatggagaagaaccccttcgtgctgggagcaaatctgaacggcggcgagcggctagtatcctacccctacgatatggcccgcacgccttacccaggagcagctgctggccgcaccatggcagcarcccggggggaggatgaggacgaggtytccraggcccangagattccagaccang

SEQ ID NO: 15 - DNA, 1024 bp, Homo sapiens
  misc_feature (938): n equals a,t,g, or c
  misc_feature (1005): n equals a,t,g, or c
  misc_feature (1012): n equals a,t,g, or c
  misc_feature (1019): n equals a,t,g, or c
cttgcctttcccagaaggctgtgcgtgctcctcgcttyctccgcggtcttccgagcggtcgcgtgaactgcttcctgcaggctggccatggcgcttcacgttcccaaggctccgggctttgccagatgctcaaggagggagcgaaacacttttcaggattagaagaggctgtgtatagaaacatacaagcttgcaaggagcttgcccaaaccactcgtacagcatatggaccaaatggaatgaacaaaatggttatcaaccacttggagaagttgtttgtgacaaacgatgcagcaactattttaagagaactagaagtacagcatcctgctgcaaaaatgattgtaatggcttctcatatgcaagagcaagaagttggagatggcacaaactttgttctggtatttgctggagctctcctggaattagctgaagaacttctgaggattggcctgtcagtttcagaggtcatagaaggttatgaaatagcctgcagaaaagctcatgagattcttcctaatttggtatgttgttctgcaaaaaaccttcgagatattgatgaagtctcatctctacttcgtacctccataatgagtaaacaatatggtaatgaagtatttctggccaagcttattgctcaggcatgcgtatctatttttcctgattccggccatttcaatgttgataacatcagagtttgtaaaattctgggctctggtatcagttcctcttcagtattgcatggcatggtttttaagaaggaaaccgaagtgatgtaacatctgtcaaagatgcaaaaatagcagtgtactcttgtccttttgatggcatgataacagaaactaagggaacagtgttgataaagactgctgaagrattgatgaattttagtaagggagragaaacctcatggrtgcacaagtcaaagctattgctgntactggtgcaatgtcgagtacaggtggcaagtggcagacatggtctcatatgcaataaattaattcntgtaggnggtaacncaaat

SEQ ID NO: 16 - DNA, 545 bp, Homo sapiens
  misc_feature (40): n equals a,t,g, or c
  misc_feature (45): n equals a,t,g, or c
  misc_feature (403): n equals a,t,g, or c
  misc_feature (476): n equals a,t,g, or c
  misc_feature (507): n equals a,t,g, or c
cccgactcactaccccccccctccccccgcctgccggccnccggnccggaattcccgggtcgacccacgcgtccggagaggagccccagccttgggattcccaagtgttttcattcagtgatcaggactgaacacagaggactcaccatggagtttgggctgagctggattttccttgctgctattttaaaaggtgtccagtgtgaggtgcagctggtggagtctgggggaggcttggtaaagcctggggggtcccttagactctcctgtgcagcctctggattcactttcagtaacgcctggatgagctgggtccgccaggctccagggaaggggctggagtgggttggccgtattaaaagcaaaactgatggtgggacaacagactacgctgcacccgtgnaaaggcagattcaccatctcaagagatgattcaaaaaacacgytgtatytgcaaatgaacagcctgaaaaccngaggacacagccgtgtattactgtaccacangacccctaattactatgatagtartgcaaaaagctttt

SEQ ID NO: 17 - DNA, 623 bp, Homo sapiens
  misc_feature (15): n equals a,t,g, or c
  misc_feature (613): n equals a,t,g, or c
  misc_feature (616): n equals a,t,g, or c
cggattcgcggccgntcgacgccgagctgggtgcggtgaggcgcgcagatcaccgcggttcctgggcagggcacggaaggctaagcaaggctgacctgctgcagctcccgcctcgtgcgctcgccccacccggccgccgcccgagcgctcgagaaagtcctctcgggagaagcagcgcctgttcccggggcagatccaggttcaggtcctggctataagtcaccatggcacagcaagctgccgataagtatctctatgtggataaaaacttcatcaacaatccgctggcccaggccgactgggctgccaagaagctggtatgggtgccttccgacaagagtggctttgagccagccagcctcaaggaggargtgggcgaagaggccatcgtggagctggtggagaatgggaagaaggtgaaggtgaacaaggatgacatccagaagatgaacccgcccaagttctccaaggtggaggacatggcagagctcacgtgcctcaacgaagcctcggtgttgcacaacctcaaggagcgttactactcagggctcatctacgtaagtggctgccgtggcaccccgcaggctgggtctgagggctccgaggtgggggnggnggcgggt

SEQ ID NO: 18 - DNA, 559 bp, Homo sapiens
  misc_feature (371): n equals a,t,g, or c
  misc_feature (531): n equals a,t,g, or c
  misc_feature (544): n equals a,t,g, or c
  misc_feature (547): n equals a,t,g, or c
  misc_feature (556): n equals a,t,g, or c
cccacgcgtccgcccacgcgtccggtgagataggtaggcaagtgtggacaaagataaaactgaaaaaccactgcaaaggttgaggtaagacaccataagccgctgaactaagacaaagtcattagtaattttaaaatgaggrtgggaattaactaacagaactgataggaagtgttaacatacaacaggggagtctaagatggcttccaattttcacttagaggggtaagggtaccattaacttaagatcattaatacagraaaattaatcagatttggagtttaccaaggtttgcttttggttgtaacaatgatatatgataaaattaaatgrataaataagtgratgcactggtgaattaatgagctgntctcattaagaccagagtacttatttataacaaaagtaacttttccctttccctgggtacatcaaactgtactccacagataacagacaccagtgagtttttcatggttaaaaaagccccaactttgacctataaatgtggaccaagaaattaaaataanctggaaccagcgngcnacggtattngga

SEQ ID NO: 19 - DNA, 1355 bp, Homo sapiens
  misc_feature (55): n equals a,t,g, or c
  misc_feature (1045): n equals a,t,g, or c
  misc_feature (1355): n equals a,t,g, or c
cagcccatggtgtcacctcggccccggacaacaggcccgccttgggctccaccgnccctccagtccacaatgtcacctcggcctcaggctctgcatcaggctcagcttctactctggtgcacaacggcacctctgccagggctaccacaaccccagccagcaagagcactccattctcaattcccagccaccactctgatactcctaccacccttgccagccatagcaccaagactgatgccagtagcactcaccatagcacggtacctcctctcacctcctccaatcacagcacttctccccagttgtctactggggtctctttctttttcctgtcttttcacatttcaaacctccagtttaattcctctctggaagatcccagcaccgactactaccaagagctgcagagagacatttctgaaatgtttttgcagatttataaacaagggggttttctgggcctctccaatattaagttcaggccaggatctgtggtggtacaattgactctggccttccgagaaggtaccatcaatgtccacgacgtggagacacagttcaatcagtataaaacggaagcagcctctcgatataacctgacgatctcagacgtcagcgtgagtgatgtgccatttcctttctctgcccagtctggggctggggtgccaggctggggcatcgcgctgctggtgctggtctgtgttctggttgcgctggccattgtctatctcattgccttggctgtctgtcagtgccgccgaaagaactacgggcagctggacatctttccagcccgggatacctaccatcctatgagcgagtaccccacctaccacacccatgggcgctatgtgccccctagcagtaccgatcgtagcccctatgagaaggtttctgcaggtaatggtggcagcagcctctcttacacaaacccagcagtggcagccacttctgccaacttgtaggggcacgtcgcccgctgagctgagtggccagccagtgccattccactccactcaggttcttcagggccagagccctngcaccctgtttgggctggtgagctgggagttcaggtgggctgctcacagctccttcagaggccccaccaatttctcggacacttctcagtgtgtggaagctcatgtgggccctgaggctcatgcctgggaagtgttgtggtgggggctcccaggaggactggcccagagagccctgagatagcggggatcctgaactggactgaataaaacgtggtctcccactgaaaaaaaaaaaaaaaaaaaaaaaaaaaaaaaaaaaaaaaaaaaaaaaaaaaaaaaaaaaaaaaaaaaaaaaaaaaaaaaaaaaan

SEQ ID NO: 20 - DNA, 1280 bp, Homo sapiens
  misc_feature (1043): n equals a,t,g, or c
  misc_feature (1162): n equals a,t,g, or c
aattcggcacgagccttacccaggtcctgctcggggctggggagaacaccaaaacaaacctggagagcatcctctcttaccccaaggacttcacctgtgtccaccaggccctgaagggcttcacgaccaaaggtgtcacctcagtctctcagatcttccacagcccagacctggccataagggacacctttgtgaatgcctctcggaccctgtacagcagcagccccagagtcctaagcaacaacagtgacgccaacttggagctcatcaacacctgggtggccaagaacaccaacaacaagatcagccggctgctagacagtctgccctccgatacccgccttgtcctcctcaatgctatctacctgagtgccaagtggaagacaacatttgatcccaagaaaaccagaatggaaccctttcacttcaaaaactcagttataaaagtgcccatgatgaatagcaagaagtaccctgtggcccatttcattgaccaaactttgaaagccaaggtggggcagctgcagctctcccacaatctgagtttggtgatcctggtaccccagaacctgaaacatcgtcttgaagacatggaacaggctctcagcccttctgttttcaaggccatcatggagaaactggagatgtccaagttccagcccactctcctaacactaccccgcatcaaagtgacgaccagccaggatatgctctcaatcatggagaaattggaattcttcgatttttcttatgaccttaacctgtgtgggctgacagaggacccagatcttcaggtttctgcgatgcagcaccagacagtgctggaactgacagagactggggtggaggcggctgcagcctccgccatctctgtggcccgcaccctgctggtctttgaagtgcagcagcccttcctcttcrtgctctgggaccagcagcacaagttccctgtcttcatggggcgagtatatgaccccagggcctgagacctgcaggatcaggttagggcgagcgctacctctccagcctcagctctcagtttnagccctgctgctgcctgcctggacttggcccctgccacctcctgcctcaggtgtccgctatccaccaaaagggctccctgagggtctgggcaagggacctgcttctattagcccttctnccatgccctgccatgctctccaaaccactttttgcagctttctctagttcaagttcaccagactctataaataaaacctgacagaccatgaaaaaaaaaaaaaaaaactcaagactag

SEQ ID NO: 21 - DNA, 1191 bp, Homo sapiens
gcaattccttctggcttcctgtgacctcacgcaagaaaaggttgtgtactaaatgaatctgctttaacttgctctccttcctcggggatcacacctttttaagaaagcctgtcccttaccttgaagcacaaacatattctcatttttattctcccaataccttgaaggttttcttctgcacatgtatttgtttgatctgccttttgtgcgtggggtgggagttaggtaggaatcttaaagtggagagccagtttcttcccaaattactgacctaacccatccttaacccccagttcaaggccacctttgtgatagtgaagcttccacatgctcactcagccccttctgctctctcttcttctctactgtgcatgtcggcttgtacttttgccagtttctctaaagacacaaccagagtggggtggctgtgtgtgcacaacttcaactttacatgtggggctgagtccctatgttgtatatccttgtgcaaaagcacaatatgttaattgctatagcttttaaaaaaataattaatagtttttcataatcaaattttcttgcttttttgttttttcaaaaaagcatacttttattgaagaataaaccccttatatatgtacacttatttataactatgaacgcctgaactaggatagaaatgcattgtgtatattacaaaacataacaaaaataataggggtagggaggtgcagatgttggtcaaaggatataaacctgcagttctatgatgaataagttctggacatctggaatacagcatggtgactatacttagtaatactatattgtacacttgaagcttactgaaagagtaaatctcaagtgttctcaccacacaaacccaaaggtaactatgttctcaccacacaaacccaaagggaactatgtattaattagcttgattgtggtaaccatttcacaatgtatacatttgccaaaacattatgttgtatacctggaatatataattttatttatcaattatacctcaataaagctgaaagaggggattactaattcccacaaaatacagatttaacaaaaacttttattcaacaaacagtgctatgaagttgtaaattggaaacaaaagaaataaaatttcatccacagtcttctcatcaaaaaaaaaaaaaaaaaaaaaaaaaaaaaaaaaaaaaaactcgtagg

SEQ ID NO: 22 - DNA, 853 bp, Homo sapiens
cttacacagcagcaacagcctgctacagggccacagccatctctgggagttagttttggaacgccattcggctcaggtattggcactggcttgcaatcaagtggcttaggttcttcaaaccttggaggatttggaactagctctggttttggatgcagcaccacaggggcctccacatttggatttggaacaacaaataaaccctcaggaagtcttagtgcaggctttggcagctcaagtacatctgggtttaacttcagcaatcctggcatcacggcatcagctggtttgacttttggggtgtccaatcctgcctctgcaggttttggaacaggaggacaactccttcagttgaagaaacctccagctggraacaaaagaggaaaaagataaacatgggttgatgtgttgagagaatccatagcagcaccgttcattctatgagtctatttttctaatgatgcagtaattaaattgcatcccaggagatttataaagttttgatatttttccctactctggratttgaactttcttcatgtttgccatactgaacawcttttttcttgtggaatttaaagtccagctgtgttttctttttaatttgattctcagtgtaagaaatgttctgattacatcactgattggtaatggttagaaaccattaacctaaaacttactatttaacctagtgtttttgttgatgaggtttacattatgtgaatacatgcacatttgtttcttatacaggtggtgtgaactctagggcctatactagaatcaatttgttccttgttaaaggccttttgaattatactgcagggcatcttgtgaatatgtatgtaaatatata

SEQ ID NO: 23 - DNA, 474 bp, Homo sapiens
ggcacgagctcgtccggcccgtgggtctgacggcttgagtagcgctagggagaatccctgcaggtaatatttgacttttgcttcatattaatctgagtggaaaataaaagggccctcttctcctctcgcttccctgccgggcaggcgccatggcggaagctcggcgacgggcgcctgcggagaggcgatggcagcggcggaaggctcctcgggcccggcgggcttgactctgggccggagcttctcgaactaccggcccttcgagccccaggcgttgggcctcagcccgagctggcggctgacgggcttctccggcatgaagggctgaggctgcaaggtcccgcagaggcgctgctcaaactcctggcgggactgamgcggccggacktkcggccccgctgggccggggcctkgtkggtkgccargaaraagcgtcccaggaagccggcctgccggcaagagcgggccccagcc

SEQ ID NO: 24 - DNA, 2280 bp, Homo sapiens
  misc_feature (13): n equals a,t,g, or c
ctctccccctccnacccctcccgctccaagattcgccgccgccgccgccgcagccgcaggagtagccgccgccggagccgcgcgcarccatggccgagaaccccagcttggagaaccaccgcatcaagagcttcaagaacaagggccgcgatgtggaaacaatgcgaagacatagaaatgaagtgacagtggaactgcggaagaacaaaagagatgaacacttattgaaaaagagaaatgttccccaagaagaaagtctagaagattcagatgttgatgctgattttaaagcacaaaatgtaaccctagaagctatattgcagaatgccacaagtgataacccagtggtccaattgagtgctgtccaggcagcaagaaaactgttatccagtgacagaaatccaccgattgatgacttaataaaatctgggattttaccaattctagtcaaatgtctagaaagggatgataatccttcattacagtttgaagctgcttgggcattaactaacatagcatcaggracttctgcacagactcaagctgttgtgcagtctaatgcagtacctctttttctgagacttcttcgttcaccacatcagaatgtttgtgaacaagcagtatgggctttgggaaacattataggtgatggtcctcaatgtagagattatgtcatatcactgggagttgtcaaacctcttctgtccttcatcagtccctccatccccatcaccttccttcggaacgtcacatgggtcattgtcaatctctgcaggaataaggatcccccaccgcctatggagacagttcaggagattttgccagctttatgtgtcctcatataccatacagatataaacattcttgtagacactgtttgggctctgtcatacttgacagatggaggtaatgaacagatacagatggttattgattcaggagttgtgccctttcttgtgccccttctgagccatcaggaagtcaaagttcaaacagcagccctcagagcagttggcaacatagtgactggcaccgacgagcagacccaggttgttctcaattgtgatgtcctgtcacacttcccaaatctcttatcacacccaaaagagaagataaataaggaagcagtgtggttcctttccaacataacagcaggcaaccagcaacaagttcaagctgtaatagatgctggattaattcctatgataattcatcagcttgctaagggggactttggaacacaaaaagaagctgcttgggcaatcagcaacttaacaataagtggcagaaaagatcaggttgagtaccttgtacagcagaatgtaataccaccgttctgtaatttactgtcagtgaaagattctcaagtggttcaggtggttctagatggtctaaaaaacattctgataatggccggtgatgaagcaagcacaatagctgaaataatagaggaatgtggaggtttggagaaaattgaagttttacagcaacatgaaaatgaagacatatataaattagcatttgaaatcatagatcagtatttctctggtgatgatattgatgaagatccctgcctcattcctgaagcaacacaaggaggtacctacaattttratccaacagccaaccttcaaacaaaagaatttaatttttaaattcagttgagtgcagcatctttcccacattcaatatgaagcaccaccagatggctaccaaatgataagaacaacagcaacmaaaggctccaaaacacacatgcctctttgttttgatgcttctaaagcaagccatgtctcagtcactttgcagttgccaaaagtcactatcacatggactgtaaatgcatatgcatgatttcctaaactgttttagaactctccttaacaatctcaactaccctatttttccctgttccctggtgccacaggctgacaactgcagtctccagtttagaataaatattccatagtggtgacatgtcagctgcccactgatactcctttggaaaatggtgcgctgtggatcaagacactttggtatgatgcatatacaagttggaagactaaagaggtgcagtgtgatctgagcctccatcattgtcctccacaaacatattttcatattctttatgtggaagaatagattttaaagtacaagccaaatgattttcattggtggaactgacacaaaaaaagtaacttaaaaacaagaaacttggttattgaataaacagataagtttaaaaaaaaaaaaaactacttcatctaccagtaattgatg

SEQ ID NO: 25 - DNA, 1061 bp, Homo sapiens
cgacccggcccagtgcgcaggcgcgggaaagttgaactaataaagtttgtacgagttcagtggaggagaccgcaagttgagtggaggaggcggcggtggggccccggaccaggtgcctccatggcaggctctgaagagctggggctccgggaagacacgctgagggtcctagctgccttccttaggcgtggtgaggctgccgggtctcctgttccaactccacctagaagccctgcccaagaagagccaacagacttcctgagccgccttcgaagatgtcttccctgctccctggggcgaggagcagccccctctgagtcccctcggccttgctctctgcccatccgcccctgctatggtttagagcctggcccagctactccagacttctatgctttggtggcccagcggctggaacagctggtccaagagcagctgaaatctccgcccagcccagaattacagggtcccccatcgacagagaaggaagccatactgcggaggctggtggccctgctggaggaggaggcagaagtcattaaccagaagctggcctcggaccccgccctgcgcacaagctggtccgcctgtcctccgactctttcgcccgcctggtggagctgttctgtagccgggatgacagctctcgcccaagccgagcatgccccgggcccccgcctccttccccggagcccctggcccgcctggccctagccatggagctgagccggcgcgtggccgggctggggggcaccctggccggactcagcgtggagcacgtgcacagcttcacgccctggatccaggccacgggggctgggagggcatcctggctgtttcacccgtggacttgaacttgccattggactgagctctttctcagaagctgctacaagatgacacctcatgtccctgccctcttcgtgtgcttttccaagtcttcctattccactcagggctgtggggtggtggttgccctacctgtttttgccaaaaataaattgtttaaaacttttcttattaaaaacgttacaaaaaaaaaaaaaaaamaggggggccgc

SEQ ID NO: 26 - DNA, 1572 bp, Homo sapiens
  misc_feature (19): n equals a,t,g, or c
  misc_feature (28): n equals a,t,g, or c
  misc_feature (1491): n equals a,t,g, or c
  misc_feature (1527): n equals a,t,g, or c
  misc_feature (1555): n equals a,t,g, or c
gtttgtcagtctcggcggnggcggcggnggtggcggcggcggcgatccacagtgattcggccgccgcgccggggggtgggggggctgcgcgggacttttttttttttcagactgaccgcggggcagctgcggacatgtcgaccccggcccggaggaggctcatgcgggatttcaagcggttacaagaggacccacctgtgggtgtcagtggcgcaccatctgaaaacaacatcatgcagtggaatgcagttatatttggaccagaagggacaccttttgaagatggtacttttaaactagtaatagaattttctgaagaatatccaaataaaccaccaactgttaggtttttatccaaaatgtttcatccaaatgtgtatgctgatggtagcatatgtttagatatccttcagaatcgatggagtccaacatatgatgtatcttctatcttaacatcaattcagtctctgctggatgaaccgaatcctaacagtccagccaatagccaggcagcacagctttatcaggaaaacaaacgagaatatgagaaaagagtttcggccattgttgaacaaagctggaatgattcataatagacaactggtctgttaatctttttcatcattgttgtgtataatttacctctcattagaaaggctaacaaattttaagtgccacaggttttaaggattctgcagaaaaaaaagaaaaaagtccttcagtttagaacctacaaaagcttgtgtatcttgattaatgtactttttattgcatggtgtgaactaagttattgctgcataaatttgtaatatatcctgtttgtatttttttccaagtgtataatgttggtgtggagttttcatgacagaatatacacattttgtaaatctgtacttttttcaaatattgaatgccttatttttgaattctttagatttttaaattggagaaaagcacttaaagttttttatatatgaatattacatgtaaagctgttaaaatacataacttcagtgcaagagactttgtcacttatttccttatgtgtgtaggaggggttaataagtctctagctctccatctattgatagtttcatttacaatttcaaaagaacattcttatattttatcaaggaagtcttcaaatttgattctaaatagcgattataatctccaactttattttgaatgtacctctattagtttcaattgagtaattctagacataactggtttgactctgtccaactctgtatttaggccatttgttacagtttcttcatgcattacttactgttaaaactgtaccttttgcgatttcacagttggcacttctgccatgagcagagaactgatgcgacttgttttgctgcttggtagcactttaaaaaattttttgattaatgaaggaaagtaaaaccataaacatttgccaaaaattcatgccccagtattaggcaatggaattaggttgcattgggtttgaggaangggcacattgggggggggaatcttggggtgttaacntttaaattattttgggaaaatttacccntttaatggccatggcct

SEQ ID NO: 27 - DNA, 2005 bp, Homo sapiens
  misc_feature (1976): n equals a,t,g, or c
  misc_feature (1977): n equals a,t,g, or c
  misc_feature (1978): n equals a,t,g, or c
  misc_feature (1979): n equals a,t,g, or c
  misc_feature (1986): n equals a,t,g, or c
  misc_feature (1988): n equals a,t,g, or c
gcggacgcgtgggtcgccmacgcgygcgcaagcagcgggttagtggtcgcgcgcccgacctccgcagtcccagccgagccgcgacccttccggccgtccccaccccacctcgccgccatgcgcctccgccgcctagcgctgttcccgggtgtggcgctgcttcttgccgcggcccgcctcgccgctgcctccgacgtgctagaactcacggacgacaacttcgagagtcgcatctccgacacgggctctgcgggcctcatgctcgtcgagttcttcgcyccctggtgtggacactgcaagagacttgcacctgagtatgaagctgcagctaccagattaaaaggaatagtcccattagcaaaggttgattgcactgccaacactaacacctgtaataaatatggagtcagtggatatccaaccctgaagatatttagagatggtgaagaagcaggtgcttatgatggacctaggactgctgatggaattgtcagccacttgaagaagcaggcaggaccagcttcagtgcctctcaggactgaggaagaatttaagaaattcattagtgataaagatgcctctatagtaggttttttcgatgattcattcagtgaggctcactccgagttcctaaaagcagccagcaacttgagggataactaccgatttgcacatacgaatgttgagtctctggtgaacgagtatgatgataatggagagggtatcatcttatttcgtccttcacatctcactaacaagtttgaggacaagactgtggcatatacagagcaaaaaatgaccagtggcaaaattaaaaagtttatccaggaaaacatttttggtatctgccctcacatgacagaagacaataaagatttgatacagggcaaggacttacttattgcttactatgatgtggactatgaaaagaacgctaaaggttccaactactggagaaacagggtaatgatggtggcaaagaaattcctggatgctgggcacaaactcaactttgctgtagctagccgcaaaacctttagccatgaactttctgattttggcttggagagcactgctggagagattcctgttgttgctatcagaactgctaaaggagagaagtttgtcatgcaggaggagttctcgcgtgatgggaaggctctggagaggttcctgcaggattactttgatggcaatctgaagagatacctgaagtctgaacctatcccagagagcaatgatgggcctgtgaaggtagtggtagcagagaattttgatgaaatagtgaataatgaaaataaagatgtgctgattgaattttatgccccttggtgtggtcaytgtaagaacctggagcccaagtataaagaacttggcgagaagctcagcaaagacccaaatatcgtcatagccaagatggatgccacagccaatgatgtgccttctccatatgaagtcagaggttttcctaccatatacttctctccagccaacaagaagctaaatccaaagaaatatgaaggtggccgtgaattaagtgattttattagctatctacaaagagaagctacaaacccccctgtaattcaagaagaaaaacccaagaagaagaagaaggcacaggaggatctctaaagcagtagccaaacaccactttgtaaaaggactcttccatcagagatgggaaaaccattggggaggactaggacccatatgggaattattacctctcagggccgagaggacagaatggatataatctgaatcctgttaaattttctctaaactgtttcttagctgcactgtttatggaaataccaggaccagtttatgtttgtggttttgggaaaaattatttgtgttgggggaaatgttgtgggggtggggttgagttgggggtattttctaattttttttgtacatttggaacagtgacaataaatgagacccctttaaaaaaaaaaaaaaaaaaaaannnnggggggncncccagtcccattcgccc

SEQ ID NO: 28 - DNA, 1408 bp, Homo sapiens
  misc_feature (11): n equals a,t,g, or c
cccgcagacangcaattttcacctgtgaggtccctggtgtctactactttgsataccacgttcactgcaaggggggcaacgtgtgggttgctctattcaagaacaacgagcccgtgatgtacacgtacgacgagtacaaaaagggcttcctggaccaggcatctgggagtgcagtgctgctgctcaggcccggagaccggtgttcctccagatgccctcagaacaggctgcaggactgtatgccgggcagtatgtccactcctccttttcaggatatttattgtatcccatgtaaaaacaaaaaaacaaaaaacaaagaaaagaaagagattttatagaagaaaatgacacaccaaaaaatccaaatgaaaaacataattgcttcaaaacacttacacagttggaaagttatatgtaagtgaaaatttggaccattgtgtacaaataaaaactaagatgcatgtttaatactccacacagcagcctgtaattgcgaatgatgggatagagttatgtatcaagtactgacacttggttgtacccactggaatcatattagctgttttatgttatatgcttccacagtaacctgcttattcagatcagtcaaaatatatcagtatgaaagatcatagctaatgaaaggcactcactcatattgtttactttaaaatatttataaatatgccttaaagaaatacaaatgataacaattacataccgtatttacttgcttaatttcctctgtatttgtgtagatactttgacatggaatatatggtggggagacccgtagtgttaccgccccagtgggagggggccctgggaccctggtaatgctttagtcaaagggatatctctcttgtatcagaggctgtgtcttttagtaacaggagtcctcgtcagaattgcgtgtctgttgtctctaaaagaatgggtgaaccaatcggcctttgtgaatttattcagtgccttctctgtaccaagcactgggtaaggcacttttgtggagcattagacagtaaccctcaaggagctagagaaccggatgggagacatgagcggtaattaactcacttgttccccagagtttctatttgttttgattttctttttctgtgacttattttcctattttctttcctccatgtaattttcactatggcccaactaatataaacacctgggaaattacaaggaaaaaaaattcttcctctaataactttccaaatttgtggaatatttatttgtaatagcagttatcagttatgcttatatagcattaaaaattctcctcctttgactacacacacaaccacagtgtggttctaatcatggagatatcagtaatttttagtaactgarttttgaggacatttctctgtttagcatgtatgcaaactggata

SEQ ID NO: 29 - DNA, 917 bp, Homo sapiens
ggcacgagcgaggggaggagccgctggctcccagccccgccgcgatgagcctcggccgcctttgccgcctactgaagccggcgctgctctgtggggctctggccgcgcctggcctggccgggaccatgtgcgcgtcccgggacgactggcgctgtgcgctccatgcacgakttttccgccaaggacatcgacgggcacatggttaacctggacaagtaccggggcttcgtgtgcatcgtcaccaacgtggcctcccagtgaggcaagaccgaagtaaactacactcagctcgtcgacctgcacgcccgatacgctgagtgtggtttgcggatcctggccttcccgtgtaaccagttcgggaagcaggagccagggagtaacgaagagatcaaagagttcgccgcgggctacaacgtcaaattcgatatgttcagcaagatctgcgtgaacggggacgacgcccacccgctgtggaagtggatgaagatccaacccaagggcaagggcatcctgggaaatgccatcaagtggaacttcaccaagttcctcatcgacaagaacggctgcgtggtgaagcgctacggacccatggaggagcccctggtgatagagaaggacctgccccactatttctagctccacaagtgtgtggccccgcccgagcccctgcccacgccctyggagccttccaccggcactcatgacggcctgcctgcaaacctgctggtggggcagacccgaaaatccagcgtgcaccccgccggaggaaggtcccatggcctgctgggcttggctcggcgcccccacccctggctaccttgtgggaataaacagacaaattagcaaaaaaaaaaaaaaaaaaaaaaaaaaaaaaaaaaaaaaaaaaaaaaaaaaaaaaaaaaaaaaaaaaaaaaaaa

SEQ ID NO: 30 - DNA, 577 bp, Homo sapiens
  misc_feature (501): n equals a,t,g, or c
  misc_feature (534): n equals a,t,g, or c
  misc_feature (568): n equals a,t,g, or c
  misc_feature (575): n equals a,t,g, or c
aattcggcacgaggtcatctggtggaaaaggagactttaagattgtttagggctgggcggggtgactcacatctgtaatcccagcactttgggaggccaaggcaggcagaacacttgaaggagttcaagaccagcgtggccaacgtggtgaaccctgtctctactaaaaatacaaaaattgtttagctctgtttttcataatagaaatagaaaaggtaaaattgcttttcttctgaaaagaacaagtattgttcatccaagaagggtttttgtgactgaatcagcagtgcctgccctagtcatagctgtgcttcagaaacctcagcatgattagtgttkgagcmmaacaaggragcaaagcaaatwcwgtttttgaaattctatctgttgcttgaactattttgtaataattaaactttggatgttgagaaatcacaactttattggtacacttcattgcaacttgaaattccatgggtcttaaagtgagattggaattcnaatgggcggcctttaaaaagtaattcccaaccnttaaggttaaaacccaggaaattggggccaatcnaaaaccngg

SEQ ID NO: 31 - DNA, 2059 bp, Homo sapiens
tgggagtaaaaatgtgtcttcagagactgtgaacatcaccatcactcaaggtttggcagtgtcaaccatctcatcattctttccacctgggtaccaagtctctttctgcttggtgatggtactcctttttgcagtggacacaggactatatttctctgtgaagacaaacattcgaagctcaacaagagactggaaggaccataaatttaaatggagaaaggaccctcaagacaaatgacccccatcccatgggggtaataagagcagtagcagcagcatctctgaacatttctctggatttgcaaccccatcatcctcaggcctctctacaagcagcaggaaacatagaactcagagccagatcccttatccaactctcgacttttccttggtctccagtggaagggaaaagcccatgatcttcaagcagggaagccccagtgagtagctgcattcctagaaattgaagtttcagrgctacacaaacamttttctgtcccaaccgttccctcacagcaaagcaacaatacaggctagggatgaaggaggagtgcaaaaragtgtccccaccctcctgccccccgcaccgtttgcccacccttcggaagacccagtgctgtgatgagtatgagtgtgcctgcaactgtgtcaatccacagtgagctgtccccttgggtacttggcctcaaccgccaccaatgactgtggctgtaccacaaccacctgccttcccgacaaggtgtgtgtccaccgaagcaccatctaccctgtgggccagttctgggaggagggctgcgatgtgtgcacctgcaccgacatggaggatgccgtgatgggcctccgcgtggcccagtgctcccagaagccctgtgaggacagctgtcggtcgggcttcacttacgttctgcatgaaggcgagtgctgtggaaggtgcctgccatctgcctgtgaggtggtgactggctcaccgcggggggactcccagtcttcctggaagagtgtcggctcccagtgggcctccccggagaacccctgcctcatcaatgagtgtgtccgagtgaaggaggaggtctttatacaacaaaggaacgtctcctgcccccagctggaggtccctgtctgcccctcgggctttcagctgagctgtaagacctcagcgtgctgcccaagctgtcgctgtgagcgcatggaggcctgcatgctcaatggcactgtcattgggcccgggaagactgtgatgatcgatgtgtgcacgacctgccgctgcatggtgcaggtgggggtcatctctggattcaagctggagtgcaggaagaccacctgcaacccctgccccctgggttacaaggaagaaaataacacaggtgaatgttgtgggagatgtttgcctacggcttgcaccattcagctaagaggaggacagatcatgacactgaagcgtgatgagacgctccaggatggctgtgatactcacttctgcaaggtcaatgagagaggagagtacttctgggagaagagggtcacaggctgcccaccctttgatgaacacaagtgtctggctgagggaggtaaaattatgaaaattccaggcacctgctgtgacacatgtgaggagcctgagtgcaacgacatcactgccaggctgcagtatgtcaaggtgggaagctgtaagtctgaagtagaggtggatatccactactgccagggcaaatgtgccagcaaagccatgtactccattgacatcaacgatgtgcaggaccagtgctcctgctgctctccgacacggacggagcccatgcaggtggccctgcactgcaccaatggctctgttgtgtaccatgaggttctcaatgccatggagtgcaaatgctcccccaggaagtgcagcaagtgaggctgctgcagctgcatgggtgcctgctgctgcctgccttgcctgatggccaggccagagtgctgccagtcctctgcatgttctgctcttgtgcccttctgagcccacaataaaggctgagctcttatcttgcaaaaaaaaaaaaaaaaaaaaaaaaaaaaaaaa

SEQ ID NO: 32 - DNA, 549 bp, Homo sapiens
  misc_feature (337): n equals a,t,g, or c
  misc_feature (378): n equals a,t,g, or c
  misc_feature (497): n equals a,t,g, or c
  misc_feature (537): n equals a,t,g, or c
  misc_feature (546): n equals a,t,g, or c
gcagcgagggagctgctctgctacgtacgaaaccccgacccagaagcaggtcgtctacgaatggtttagcgccaggttccccacgaacgtgcggtgcgtgacgggcgagggggcggccgctctagaggatccaagcttacgtacgcgtgcatgcgacgtcatagctcttctatagtgtcacctaaattcaattcactggccgtcgttttacaacgtcgtgactgggaaaaccctggcgttacccaacttaatcgccttgcagcacatccccctttcgccagctggcgtaatagcgaagaggcccgcaccgattcgccctttcccaacagttgcgcanctggaatggcgaatggggacgcgccctgtatgggcgcgttnaagcgcggcgggtgtggtggttacgcgcagtggacccgctacacttgccagcgccctagcgcccgctcctttcgctttcttcccttcctttctcgccacgttcgccggctttccccttnaagctctaaatcggtgggctccctttaggtgtcctatttngtgctttanggt

SEQ ID NO: 33 - DNA, 841 bp, Homo sapiens
gctttgaacctcaacagccagctgaacatacccaaagacacaagccaactgaagaaacatatcaccttgctctgcgatagattatccaaaggtggccgtctctgcctaagtaccgatgcagcagccccacagaccatggtcatgccaggtggttgtactacaatcccagagtcagacctagaagaaagatcagtagaacaagactctacagaactgtttaccaaccacagacatctcactgcagagacacccaggcctgtttcacccctccaaggagtctcggaataattccaagtagagttgtttggttgagaggaacatccccatctcaaggccgaacctgtgtgaacctcatgccaagcacagatatarggctggcgcaggtgcttccyaaagctyaccttcctggagatgacatgcatagaaagaggggttgggactttttacttcactaggagaacttgtaacaccatggggaagtcagctgaaacttgtcttgttttgccaggaaaggaagtagttgcctttggtcatccatctgctaatagtcacagaatacagtgaaatgacatagttttgggttagattttataatgcaaagattcagatccaaaataatttcataccccattttttcacagaattcttatatagtaaatgtatcaagtttaataaagcatctcattgtcaaataatatcttggattttatttataattagagggatttatgagtgattgctctacattatttcttcaaaggaaaggaaaggaattgaagactttgctactctctggtaagacttgaatgtgattattttataaataaaagaaccactatga

SEQ ID NO: 34 - DNA, 863 bp, Homo sapiens
  misc_feature (19): n equals a,t,g, or c
  misc_feature (29): n equals a,t,g, or c
  misc_feature (44): n equals a,t,g, or c
  misc_feature (58): n equals a,t,g, or c
accaaaaaagctttggagntttccaaccnccggtttgcggcccngttttttagaactnagtggaatccccccggggctttcaaggaattcggcacgagtttgcttaggcgcagacggggaagcggagccaacatgccagtggcccggagctgggtttgtcgcaaaacttatgtgaccccgcggagacccttcgagaaatctcgtctcgaccaagagctgaagctgatcggcgagtatgggctccggaacaaacgtgaggtctggagggtcaaatttaccctggccaagatccgcaaggccgcccgggaactgctgacgcttgatgagaaggacccacggcgtctgttcgaaggcaacgccctgctgcggcggctggtccgcattggggtgctggatgagggcaagatgaagctggattacatcctgggcctgaagatagaggatttcttagagagacgcctgcagacccaggtcttcaagctgggcttggccaagtccatccaccacgctcgcgtgctgatccgccagcgccatatcagggtccgcaagcaggtggtgaacatcccgtccttcattgtccgcctggattcccagaagcacatcgacttctctctgcgctctccctacgggggtggccgcccgggccgcgtgaagaggaagaatgccaagaagggccagggtggggctggggctggagacgacgaggaggaggattaagtccacctgtccctcctgggctgctggattgtctcgttttcctgccaaataaacaggatcagcgctttacaaaaaaaaaaaaaaaaaaaaaaaaaaaaaaaaaaaaaaaaaaaaaaaaaaaaaaaaaaaaaaaaaaaaaaaaattt

SEQ ID NO: 35 - DNA, 1230 bp, Homo sapiens
tgcaggaattcggcacgagcccagcgccgccgccatgtcctccggggctagcgcgagcgccctgcagcgcttggtagagcagctcaagttggaggctggcgtggagaggatcaaggtctctcaggcagctgcagagcttcaacagtactgtatgcagaatgcctgcaaggatgccctgctggtgggtgttccagctggaagtaaccccttccgggagcctagatcctgtgctttactctgaagactctaggagagaagtttgctgaggaatgccttcaagcacaaagtgatgaatgactgccttcaagtctcaagaaaacacttttccctaacttttagagatatttcagccctttcctgtggcctggtcctatagccaaaatcacagatattcatgagtttctacttgagtgagaaaactgggtgaaggaatagaattttaaatagtaataactgcttgttttttttgtgcaagtacttttatacataagataaacaaaaaccttaccaccaaacataccaaaatgcacctctttcataagtgagttactaagatttctatacctggaatatcatgtatgtttcatttactggatgtttacattttaggaaggaaaatagttytgtttatttaaacaactgaatacttataaactgttgttcctggaagttatttattccataaaaaatttgttcttttctcatgaatttataattcctaaatgaagaccagaaagtacaaattgctgggaggaagaataggctttattaatcaactgatgtcttgatttttctaaatgggaagattgctttatttttaacactaattatgggagcagattcttagcaaacttctttggaaaagttaatgttatgatgtgcattaggctgccccatcgtgtatataaatgaagcagatttgatttttgtattcttacgtttctctgctttgtagttgtggctgtacttaaagaaatacagaatttcatatatttaaaaatgtttaaaatgtgacccacagaacattgtaaatgattaaaaactaacatgaaaatattacaacctaaaagaattcttaacttcacaagtgttttacttcgacgatgtgcctttgatttaatttgggacacttttttagaaggatacattattcgtgtttgcaacggtctttgaagagcttggaaataaaatttctgcttaattaatcatttttctatgacagcaaaaaaa

SEQ ID NO: 36 - DNA, 640 bp, Homo sapiens
caacccaaatcgctcactatagggaaagctggtcgcctgcaggtaccggtccggaattcccgggtcgacccacgcgtccggctgtctgaagatagatcgccatcatgaacgacaccgtaactatccgcactagaaagttcatgaccaaccgactacttcagaggaaacaaatggtcattgatgtccttcaccccgggaaggcgacagtgcctaagacagaaattcgggaaaaactagccaaaatgtacaagaccacaccggatgtcatctttgtatttggattcagaactcattttggtggtggcaagacaactggctttggcatgatttatgattccctggattatgcaaagaaaaatgaacccaaacatagacttgcaagacatggcctgtatgagaagaaaaagacctcaagaaagcaacgaaaggaacgcaagaacagaatgaagaaagtcagggggactgcaaaggccaatgttggtgctggcaaaaagccgaaggagtaaaggtgctgcaatgatgttagctgtggccactgtggatttttcgcaagaacattaataaactaaaaacttcaaaaaaaaaaaaaaaaaaaaaaaaaaaaaaaaaaaaaaaaaaaaaaaaaaaaaaaaaaaaaagg

SEQ ID NO: 37 - DNA, 597 bp, Homo sapiens
  misc_feature (10): n equals a,t,g, or c
  misc_feature (15): n equals a,t,g, or c
  misc_feature (32): n equals a,t,g, or c
  misc_feature (556): n equals a,t,g, or c
  misc_feature (558): n equals a,t,g, or c
  misc_feature (567): n equals a,t,g, or c
  misc_feature (590): n equals a,t,g, or c
ggtgagaccntctanaatatggttccccgggntgccgattcgccaaggtgctcggtccttccgaggaagctaaggctgcgttggggtgaggccctcacttcatccggcgactagcaccgcgtccggcagcgccagccctacactcgcccgcgccatggcctctgtctccgagctcgcctgcatctactcggccctcattctgcacgacgatgaggtgacagtcacggaggataagatcaatgccctcattaaagcagccggtgtaaatgttgagcctttttggcctggcttgtttgcaaaggccctggccaacgtcaacattgggagcctcatctgcaatgtaggggccggtggacctgctccagcagctggtgctgcaccagcaggaggtcctgccccctccactgctgctgctccagctgaggagaagaaagtggaagcaaagaaagaagaatccgaggagtctgatgatgacatgggctttggtctttttgactaaacctcttttataacatgttcaataaaaagctgaactttaaaaaaaaaaaaaaaaaancncgggggggnccgctttaaagggtccaagttangtacggg

SEQ ID NO: 38 - DNA, 624 bp, Homo sapiens
  misc_feature (79): n equals a,t,g, or c
ggaccccgtcgccctcctgatgctgctcgtggacgctgatcagccggagcccatgcgcacggggcgcgcgagctcgcgntcttcctgacccccgakcctggggccgaggcgaaggaggtggaggagaccatcgagggcatgctcctcaggctggaagagttttgcagcctggctgacctgatcaggagtgatacttcacagatcctggaggaaaacatcccagtccttaaggccaaactgacagaaatgcgtggcatctatgccaaagtggaccggctagaggccttcgtcaagatggttggacaccacgtcgccttcctggaagcagacgtgcttcaggctgagcgggaccatggggccttccctcaggccctgcggaggtggctgggatccgcaggctcccctccttcaggaacaagtcamctgsacckgtgcccgtgacgtacgagctgcccacactgtataggacggaggactattttcctgtggacgccgggkaagcacagcamcamccccgcacctgccctcggcctttgtgagctttgtggtcttcccatcaggaacactggaaagtgacattgtgtacacgctgcagcttgggggttttttctttgtattgctgtt

SEQ ID NO: 39 - DNA, 1029 bp, Homo sapiens
ggcccctcgagggatcctctagagcggccgccgactagtgagctcgtcgacccgggaattcgcggccgcgtcgacgctcagtcttccaccaaaggccgttcagttctcctgggctccagcctcctgcaaggactgcaagarttttcctccgcagctctgartctccacttttttggtggagaaaggctgcaaaaagaaaaagagacgcagtgagtgggaaaagtatgcatcctattcaaacctaattgaatcgargarcccagggacacacgccttcaggtttgctcargggttcatatttggtgcttagacaaattcaaaatgaggaaacatcggcacttgcccttagtggccgtcttttgcctctttctctcaggctttcctacaactcatgcccagcagcagcaagcagtcattgaagtcaacaagagagacatagtcttcctggtggatggctcatctgcactgggactggccaacttcaatgccatccgagacttcattgctaaagtcatccagaggctggaaatcggacaggatcttatccaggtggcagtggcccagtatgcagacactgtgaggcctgaattttatttcaatacccatccaacaaaaagggragtcataaccgctgtgcggaaaatgaagcccctggamggstcggccctgtacacgggctctgctctagactttgttcgtaacaacctattcacgagttcagccggctaccgggctgccgaggggattcctaagcttttgktgctgatcacaggtggtaagtccctagatgaaatcagccagcctgcccaggagctgaagagaagcagcataatggcctttgccattgggaacaagggtgccgatcaggctgagctggaagagatcgctttcgactcctccctggtgttcatcccagctgagttccgagccgccccattgcaaggcatgctgcctggcttgctggcacctctcaggaccctctctggaacccctgaagttcactcaaacaaaagggatatcatctttctg

SEQ ID NO: 40 - DNA, 1107 bp, Homo sapiens
  misc_feature (1098): n equals a,t,g, or c
  misc_feature (1106): n equals a,t,g, or c
tgaatggcttatttaaataagttggatctatggactctccacagcctagatattatcctactgaagatgtgcctcgaaagctgttgagccacggcaaaaaacccttcagtcagcacgtgagaaaactgcgagccagcattacccccgggaccattctgatcatcctcactggacgccacaggggcaaggtgagagtacctgtgcttggggcgcttcactgcagctgcctggggtgcctggtggcaatgcgtttgcacgctaggtgtacttttcctttatttacctatgtttggggcaaggggaaatgatctgcaagatacaacttagttgttgcaaataagaagtgtaatccatggtgatttattagccatttcctgctgttgatwatgttacacatgtycatttactcaaaaacgtgtttatgtctggagtactaccttagtagcttgctgtggttgcttccagaactgccgagctgtatacatatacatgtagaaatttccttacccmaatttagatgcctgtgawtttawgaatcagaagycagttttaawtgcmgaaaacyaattattytctttttamcttacaagagggtggttttcctgaagcagctggctagtggcttattacttgtgactggacctctggtcctcaatcgagttcctctacgaagaacacaccagaaatttgtcattgccacttcaaccaaaatcgatatcagcaatgtaaaaatcccaaaacatcttactgatgcttacttcaagaagaagaagctgcggaagcccagacaccaggaaggtgagatcttcgacacagaaaaagagaaatatgagattacggagcagcgcaagattgatcagaaagctgtggactcacaaattttaccaaaaatcaaagctattcctcagctccagggctacctgcgatctgtgtttgctctgacgaatggaatttatcctcacaaattggtgttctaaatgtcttaagaacctaattaaatagctgactacaaaaaaaaaaaaaaaaaaaaaaaaaaaaaaaaaaaaaaaaaaaaaaaaaaaaaaaaaaaaccccgggggggggcccggttcccatttngccctttng

SEQ ID NO: 41 - DNA, 1051 bp, Homo sapiens
cttggaagtcagtcgtagtcctcgcagtctcggcgggagctggaagtgcgcatccacgacagaacaaatattcggtgcttttacctacctacaacgagcgcgagaacctgccgctcatcgtgtggctgctggtgaaaagcttctccgagagtggaatcaactatgaaattataatcatagatgatggaagcccagatggaacaagggatgttgctgaacagttggagaagatctatgggtcagacagaattcttctaagaccacgagagaaaaagttgggactaggaactgcatatattcatggaatgaaacatgccacaggaaactacatcattattatggatgctgatctctcacaccatccaaaatttattcctgaatttattaggaagcaaaaggagggtaattttgatattgtctctggaactcgctacaaaggaaatggaggtgtatatggctgggatttgaaaagaaaaataatcagccgtggggccaattttttaactcagatcttgctgagaccaggagcatctgatttaacaggaagtttcagattataccgaaaagaagttctagagaaattaatagaaaaatgtgtttctaaaggctacgtcttccagatggagatgattgttcgggcaagacagttgaattatactattggcgaggttccaatatcatttgtggatcgtgtttatggtgaatccaagttgggaggaaatgaaatagtatctttcttgaaaggattattgactctttttgctactacataaaagaaagatactcatttatagttacgttcatttcaggttaaacatgaaagaagcctggttactgatttgtataaaatgtactcttaaagtataaaatataaggtaaggtaaatttcatgcatctttttatgaagaccacctattttatatttcaaattaaataattttaaagttgctggcctaatgagcaatgttctcaattttcgttttcattttgctgtattgagacctataaataaatgtatatttttttttgcataaarwaaaaaaaaaaaacc

SEQ ID NO: 42 - DNA, 2192 bp, Homo sapiens
ggcgaacctggtgatgctggtgctaaaggcgatgctggtccccctggccctgccggacccgctggaccccctggccccattggtaatgttggtgctcctggagccaaaggtgctcgcggcaggctggtccccctggtgctactggtttccctggtgctgctggccgagtcggtcctcctggcccctctggaaatgctggaccccctggccctcctggtcctgctggcaaagaaggcggcaaaggtccccgtggtgagactggccctgctggacgtcctggtgaagttggtccccctggtccccctggccctgctggcgagaaaggatcccctggtgctgatggtcctgctggtgctcctggtactcccgggcctcaaggtattgctggacagcgtggtgtggtcggcctgcctggtcagagaggagagagaggcttccctggtcttcctggcccctctggtgaacctggcaaacaaggtccctctggagcaagtggtgaacgtggtccccctggtcccatgggcccccctggattggctggaccccctggtgaatctggacgtgagggggctcctggtgccgaagttcccctggacgagacggttctcctggcgccaagggtgaccgtggtgagaccggccccgctggaccccctggtgctcctggtgctcctggtgcccctggccccgttggccctgctggcaagagtggtgatcgtggtgagactggtcctgctggtcccgccggtcctgtcggccctgttggcgcccgtggccccgccggaccccaaggcccccgtggtgacaagggtgagacaggcgaacagggcgacagaggcataaagggtcaccgtggcttctctggcctccagggtccccctggccctcctggctctcctggtgaacaaggtccctctggagcctctggtcctgctggtccccgaggtccccctggctctgctggtgctcctggcaaagatggactcaacggtctccctggccccattgggccccctggtcctcgcggtcgcactggtgatgctggtcctgttggtccccccggccctcctggacctcctggtccccctggtcctcccagcgctggtttcgacttcagcttcctgccccagccacctcaagagaaggctcacgatggtggccgctactaccgggctgatgatgccaatgtggttcgtgaccgtgacctcgaggtggacaccaccctcaagagcctgagccagcagatcgagaacatccggagcccagagggcagccgcaagaaccccgcccgcacctgccgtgacctcaagatgtgccactctgactggaagagtggagagtactggattgaccccaaccaaggctgcaacctggatgccatcaaagtcttctgcaacatggagactggtgagacctgcgtgtaccccactcagcccagtgtggcccagaagaactggtacatcagcaagaaccccaaggacaagaggcatgtytggttcggcgagagcatgaccgatggattccagttcgagtatggcggccagggctccgaccctgccgatgtggccatccagctgaccttcctgcgcctgatgtccaccgaggcctcccagaacatcacctaccactgcaagaacagcgtggcctacatggaccagcagactggcaacctcaagaaggccctgctcctccagggctccaacgagatcgagatccgcgccgagggcaacagccgcttcacctacagcgtcactgtcgatggctgcacgagtcacaccggagcctggggcaagacagtgattgaatacaaaaccaccaagacctcccgcctgcccatcatcgatgtggcccccttggacgttggtgccccagaccaggaattcggcttcgacgttggccctgtctgcttcctgtaaactccctccatcccaacctggctccctcccacccaaccaactttccccccaacccggaaacagacaagcaacccaaactgaaccccctcaaaagccaaaaaatgggagacaatttcacatggactttggaaaatatttttttcctttgcattcatctctcaaacttagtttttatctttgaccaaccgaacatgaccaaaaaccaaaagtgcattcaaccttaccaaaaaaaaaaaaaaaaaaaaactcggggggggcccggtaccaattggcctaa

SEQ ID NO: 43 - DNA, 353 bp, Homo sapiens
  misc_feature (37): n equals a,t,g, or c
  misc_feature (348): n equals a,t,g, or c
tctctaatacgactcactatagggaaagctggttacnctgcaggtaccggtccggaattcccgggtcgacccacgcgtccggtggggcttcaccaagttcaatgctgatgaatttgaagacatggtggctgaaaagcggctcatcccagatggctgtggggtcaagtacatccccagtcgtggccctctggacaagtggcgggccctgcactcatgagggcttccaatgtgctgcccccctcttaatactcaccaataaattctacttcctgtccaaaaaaaaaaaaaaaaaaaaaaaaaaaaaaaaaaaaaaaaaaaaaaaaaaaaaaaaaaaaaaaaaaaaaaaanaaaag

SEQ ID NO: 44 - DNA, 3490 bp, Homo sapiens
  misc_feature (782): n equals a,t,g, or c
  misc_feature (1311): n equals a,t,g, or c
  misc_feature (2298): n equals a,t,g, or c
acaaaaattttacgatacaagtagcctgccagtacggtccggaaattcccgggtcgacccacgcgtccggtgaaaactgttgcattattcctccatcctgtctggaatacaccaggtcaacaccagagatctcagatcagaatcagagatctcagaggggaataagttcatcctcatgggatggtgaggggcakgaaagcggctgggctcttggacacctggttctcagagaaccctgtgatgatcacccaagccccaggctgtcttagcccctggagttcagaagtcctctctgtaaagcctgcctcccamtargtcaagaggaactagagtacctttggatttatcaggaccctcatgtttaaatggttatttccctttgggaaaacttcagaaactgatgtatcaaatgaggccctgtgccctcgatctatttccttcttccttctgacctcctcccaggcactcttacttctagccgaactcttagctctgggcagatctccaagcgcctggagtgctttttagcagagacacctcgttaagctccgggatgaccttgtaggagatctgtctccctgtgcctggagagttacagccagcaaggtgcccccatcttagagtgtggtgtccaaacgtgaggtggcttcctagttacatgaggatgtgatccaggaaatccagtttggaggcttgatgtgggttttgacctggcctcagccttggggctgtttttccttgttgccccgctctagacttttagcagatctgcagcccacagnkcttttttggaaggagtggcttcctgcaggtgttccacctgcyttcggagcctgccacccaggccctcagaactgagccacaggctgctctggccaggagagaaacagctctgttgttctgcattgggggaggtacattcctgcatcttctcaccccctcaaccaggaactggggatttgggatgagatatggtcagacttgtagataaccccaaagatgtgaagatcgcttgtgaaaccattttgaatgaatagattggtttcctgtggctccctccaaacctggccaagcccagcttccgaagcaggaaccagcactgtctctgtgcctgactcacagcatataggtcaggaaagaatggagacggcattcttggacttcactggggctgctggattggatgggaaaccttctggaagaggcagatgggggtcaaaccactgccttggccccaggaaggggcataggtaggtctgaacaactgccgcaagaccactacatgacttagggaacttgaaaccaactggnctcatggagaaaacaaatttgacttgggaaagggattatgtaggaataatgtttggacttgatttccccacgtcataatgaagaatggaagtttggatctgctcctcgtcaggcgcagcatctctgaagcttggaaagctgtcttccagcagcctccgtggcctcgggttcctaccggcttctctgcatttggtctgctgatcatgttgccataatgtgtatggaaagtgtacacattcttactggttaaagacgactaccaggtatctaacttgtttaacattgagtttgtgtgtgtgtgtgtatgtttgtgtgttttgtatattgtttacattttgagaggtagcattctgtttcaaatgctttttgtttttctgacagtattgttgactgggtcataacattttgagctgtggtttggtggattttcaatttttttttttaaaggtcattcgctgtgctatcttcaaaaccttgagtttggcccccaatttttggcattcaaatgtttaaaagctatttatcttggtttatacaagtttcctttctcttctttttgtcatggtattctatttggtctgcagtttgaatgtagagaaagtggactgatcccccaagcgttgtctgcccccactctttcctccttgggtcccgccattcttttactgggcagtcgagggcattggaggggaagtgactgccctcagcctcactccctggggccatgaagaaaagctaaacagtctcatggcatctcagaataatgttgggtctcccaagaagaaaggtgtaagaataacgacatggctgattaggcgaggccaggatagggctaaggccaggattcctggctggcatccagtcaccccttctcccatccttccccctcttcttccacaagtccgcagccgagacactgtagtctcccagccacagtgatgagtgccctggagactccactgacctctagatgaaggcccctggccntggttcctgttaattaacctctgggtctttgagtcccccagcacaaacttctttcctgtaccctgcggcttggggtcacagggcatgccgggaagccacagctgaggggcgcagactgaagcagtgctccacctctccttctttagctcaggggttgctggtctgtggcaggcgccacgagtggcccctgtggctgttctcagtggcagtctcttaagttcccaccacaggcagctctttatcccctctccctacttsactctttctcttgcctgtgcttttggcctcaaacaggcctgctggtagcgctcagggcgtgaggctacactcctgccctgcctttcctgtcttcatggtctgccagggcataccttggggaggtggaccaaagacccaggactttttgcagtagccagtcctaccccccagttgtctttttaccaattcagggtgggagagaaaactgcagcaccccagcatgtgagttactcaggtgttgggggctagaagggacagtgcgtttaaacaacactcagagctctggccttaaacctgtggccccccaagtctaggagcctcatctcttcctggcagtcatgcgggcaggaggtcctgaaagggaaaacccattcagacaactgttccccaatctaccagccatctgcaggggtcagtgaccgtggccctctccctcctctagaatgtgccacttatgaagagtgccccatggggaaaaggagactcagctgtcccttggcagcttgtgccagtatcccagggcagaagtttccacaggagcctcttgcccttgcgcagagccactgtgagaggcggtgggagccaacacccttgggggagggggcagtactgctcggcacatcccagcatcaggtcagatcaytgaaattaaaaaatgtgaattaagttcatatccaccttttggggaagcaggacaaaccaccaccccaccaagtgtgtgacttctccatatcccactgcagtttccattttttaaatgggaattttcaatcccctgtgcttgtctaacgtctgctttaaaaagtttgagaccctgttactgtttgaaaatgcatgcatgttacgatgaatctccaacctgaggaaaaaaataaaactcaaaaagctttgtgtaaaaaaaaaaaaaaaaaaaaaaaaaaaaaaaaaaaaacct

SEQ ID NO: 45 - DNA, 781 bp, Homo sapiens
  misc_feature (750): n equals a,t,g, or c
gtcagatgttccttttcccaaatcattattcctttggccagaaggttggacttgataccttccagcagcctggagcctcatggccaaaccaggtcctcaggcatcccaggatttccaggcatcagatggagggtgagggctgcccagcaaatgtcagtgtgtgtcaacatttactgcaggttcagagctccctccagggtccctgagtacatcatgtgctcctgagagttttaagggaaagccaagtaaagacgtgatgatgttctaaacccaagcaattaataaaygccacggaaatcagtcattcacttaccaagtatttctctgctttctgccatgtcacgggsccatgatcccctggagattgagggaaataagatcacaggagctcccagtctgagtgagaaaaggcagctgctctgtggtactgtgcactggacctgggaatggcctaaggagacaagcattgagggctgagctcagaagccagggagaagagctcagaaccccaggagaggagctcagaaccctgggagaggagctcagaaccctgggagggcttggtaaccttcgaggatgtggccgtggagttcacccaggaggagtgggcgttgctggaccctgcccaaaggacactgtacagggatgtgatgctggagaactgcaggacctggcctcactarggtgtcgtgttaataaacccagtctgatatcccagttggamcaagacaagaagktggtgacagaggnaagaggaatctaccaagcacctgtccagatt

SEQ ID NO: 46 - DNA, 1431 bp, Homo sapiens
gggtcgacccacgcgtccgcttcagagaagaatttctctttagttctttgcaagaaggtagagataaagacactttttcaaaaatggcaatggtatcagaattcctcaagcaggcctggtttattgaaaatgaagagcaggaatatgttcaaactgtgaagtcatccaaaggtggtcccggatcagcggtgagcccctatcctaccttcaatccatcctcggatgtcgctgccttgcataaggccataatggttaaaggtgtggatgaagcaaccatcattgacattctaactaagcgaaacaatgcacagcgtcaacagatcaaagcagcatatctccaggaaacaggaaagcccctggatgaaacactgaagaaagcccttacaggtcaccttgaggaggttgttttagctctgctaaaaactccagcgcaatttgatgctgatgaacttcgtgctgccatgaagggccttggaactgatgaagatactctaattgagattttggcatcaagaactaacaaagaaatcagagacattaacagggtctacagagaggaactgaagagagatctggccaaagacataacctcagacacatctggagattttcggaacgctttgctttctcttgctaagggtgaccgatctgaggactttggtgtgaatgaagacttggctgattcagatgccagggccttgtatgaagcaggagaaaggagaaaggggacagacgtaaacgtgttcaataccatccttaccaccagaagctatccacaacttcgcagagtgtttcagaaatacaccaagtacagtaagcatgacatgaacaaagttctggacctggagttgaaaggtgacattgagaaatgcctcacagctatcgtgaagtgcgccacaagcaaaccagctttctttgcagagaagcttcatcaagccatgaaaggtgttggaactcgccataaggcattgatcaggattatggtttcccgttctgaaattgacatgaatgatatcaaagcattctatcagaagatgtatggtatctccctttgccaagccatcctggatgaaaccaaaggagattatgagaaaatcctggtggctctttgtggaggaaactaaacattcccttgatggtctcaagctatgatcagaagactttaattatatattttcatcctataagcttaaataggaaagtttcttcaacaggattacagtgtagctacctacatgctgaaaaatatagcctttaaatcatttttatattataactctgtataatagagataagtccattttttaaaaatgttttccccaaaccataaaaccctatacaagttgttctagtaacaatacatgagaaagatgtctatgtagctgaaaataaaatgacgtcacaagacaaaaaaaaaaaaaaaaaaaaaaa

SEQ ID NO: 47 - DNA, 1913 bp, Homo sapiens
  misc_feature (43): n equals a,t,g, or c
  misc_feature (1878): n equals a,t,g, or c
  misc_feature (1896): n equals a,t,g, or c
  misc_feature (1905): n equals a,t,g, or c
  misc_feature (1907): n equals a,t,g, or c
cccacgcgtccggccagctcattgctcttatagcctgtgaggnagraagaaacatttgcyagccaggctagtgacagaaatggattcgaaataycagtgtgtgaagctgaatgatggtcacttcatgcctgtcctgggatttggcacctatgcgcctgcagaggttcctaaaagtaaagctytagaggccrycaaattggcaatwgaagcyggsttccrccatattgattctgcwcatktwtacaataatgaggagcaggttggactggccatccgaagcaagattgcagatggcagtgtgaagagagaagacatattctacacttcaaagctttggwgcaattcccatcgaccagagttggtccgaccagccttggaaaggtcactgaaaaatcttcaattggattatgttgacctctaycttattcattttccagtgtctgtaaagccaggtgaggaagtgatcccaaaagatgaaaatggaaaaatactatttgacacagtggatctctgtgccacrtgggaggccgtggagaagtgtaaagatgcaggattggccaagtccatcggggtgtccaacttcaaccrcaggcagctggagatgatcctcaacaagccagggctcaagtacaagcctgtctgcaaccaggtggaatgtcatccttacttcaaccagagaaaactgctggatttctgcaagtcaaaagacattgttctggttgcctatagtgctctgggatcccaycgagaagaaccatgggtggacccgaactccccggtgctcttggaggacccagtcctttgtgccttggcaaaaaagcacaagcgaaccccagccctgattgccctgcgctaccagctrcagcgtggggttgtggtcctggccaagagctacaatgagcagcgcatcagacagaacgtgcaggtgtttgaattccagttgacttcagaggagatgaaagccatagatggcctaaacagaaatgtgcgatatttgacccttgatatttttgctggcccccctaattatccattttctgatgaatattaacatggagggcattgcatgaggtctgccagaaggccctgcgtgtggatggtgacacagaggatggctctatgctggtgactggacacatcgcctctggttaaatctctcctgcttggygayttcagyaagctacagcwaagcccatyggccrgaaargaaagacaataattttgttttttcattttgaaaaaattaaatgctctctcctaaagattcttcacctactttcgtctccataacttctatgttttctttccttctgacacactagtgcccctaaattgtgatttgcctatacgtttagggccggggttggaagatgttaacaaccatttaagattcatttctgcagtgggagtgggtggagtttcaccctctgggaaaggggcaggtgacaggtatttatcagtcagtgcctctctagctcttgtaggaagaagcacacgcaggatggagtctagaggatgagcgatattgactagcaattcatgggctccctccagcagtgcgagggtcagagtttctggagccttgggaggaggcatccctgtgagggggggttagggagatgggagggcaccaggaaaagtgattagaagtcaggtatgggaaggctaaataggacagagtcgagtacatctctgcttggaaaaacatatcaacaccctttttttttgaacattatatcttgttcataaaagaaaactttccacattgttttaacaaaccccacagctggagagttcaggcctggaatctttggatgtgtgcccagttcacagattggaccctattggtttgtggtggggccagggcatccaaagacntcattggactaattcacnttcccccgnanagcccc

SEQ ID NO: 48 - DNA, 1761 bp, Homo sapiens
cgaggagctctgaggtctatgctcagctgtgcaacgtggctcgcattgaggcagagcgggaggccggggtccacttccggccaggctatgagtatggccccgggcccgatgacctgcactacagcatctatggcccagatggggcccccttctacaactacctgggccccgaggacaccgtccctgagcctgccttccccaacacagccggtcactcagcggaccgcacacccatccttgagtctcctttgcagccctcagaactccagccccactacgtggccagccatccagagcccccagccggcttcgaagggcttcaggcggaggagtgcggcatcctgaacggctgtgagaatggccgctgtgtgcgcgtgcgggagggctacacctgtgactgttttgagggcttccagctggatgcggcccacatggcctgcgtagatgtgaatgagtgtgatgacttgaacgggcctgctgtgctctgtgtccatggttactgcgagaacacagagggctcctaccgctgccactgctccccgggatatgtggctgaggcagggcccccccactgcactgccaaggagtagcagtcaggggtcagtgtggcaactacctggaaatggcctccagtcacaggcaggggccttgaggatgatttcctagctgggaagacaccgtgacatcaggccagaggtttccaatcagccttgcctgctttcatctctcccagcttagcctctggctgtaagcttcggtcattgcctccatgcccttgcttggctcaagcaccaccaatcgctttaatgcttcagccaccgcatgaggccctgtccaccacctttcctggccttgctatgggatgcttaccaaaggatggccctcatccaccctcccaagctgtgcragcatgcaaggccccatggctcacactgcagacacccctttccagccacaatccaccatcatcctgacgatcccacaactgggacagaggctacatctgccctagggaggtccttcagaatctgtggagcaagaaaggatttggggaagcttggggactgactccagagccccctcctaagaaccatcaccaccactcagccaatctgttctgggccctgattttgccacacctccatcctgtagcccattctctgaccccaaggagtggcagaagatcccttcactcagagaagcaaggctgatattagcttgttgaatgtaagagacacaaatgaagaagaacaaagagcctgagaaagcagcaagaggacatgatgaaaaatacgtggagttgatgagaaaggggagccaaggctttatacgtctaaagaaaatattcagtagctgaatccgcccagtgatagcctgtgggcaccagcagcaagggctgccatgggatacagyacccatctacaaagacctctattacataaacactgcttcttacaggaaacaaacctcttctgggatctccttttgtgaaaaccagtttgatgtgctaaaagtaaaaagtctattttccagtgtggtcttgttcagaagcagccagatttccaatgttgtttttcccctccactcagaaacccctgccctttcccttcagaaaacgatggcaggcattcctctgagtttacaagcagagactcactccaacccaaactagctgggagttcagaaccatggtggaataaagaaatgtgcatctggtcaaaaaaaaaaaaaaaaaaaaaaaaaaaaaaaaaaaaaaaaagg

SEQ ID NO: 49 - DNA, 956 bp, Homo sapiens
  misc_feature (37): n equals a,t,g, or c
  misc_feature (352): n equals a,t,g, or c
tgcaggagttcggcacgagggtatttagagcgcaggnctgacgggccggatcgccttcgccgccgcccgcccgcaaaccttcgtgcccggcccgtcctcgcccccgcctccgccaccgcctcggcccgcagagcttgccccctccccacccgcagacatgtccgagtccaagagcggccccgagtatgcttcgtttttcgccgtcatgggcgcctcggccgccatggtcttcagcgccctgggcgctgcctatggcacagccaagagcggtaccggcattgcggccatgtctgtcatgcggccggagcagatcatgaagtccatcatcccagtggtcatggctggcatcatngycatctacggcctggtggtggcagtcctcatcgccaactccctgaatgacgacatcagcctctacaagagcttcctccagctgggcgccggcctgagcgtgggcctgagcggcctggcagccggctttgccatcggcatcgtgggggacgctggcgtgcggggcaacgcccagcagccccgactattcgtgggcatgatcctgattctcatcttcgccgaggtgctcggcctctacggtctcatcgtcgccctcatcctctccacaaagtagaccctctccgagcccaccagccacagaatattatgtraagaccacccctcctcatcgcccctccaggcccccggcgccccaccccctagagtgctctgtgtatgcggatgatttagaattgtcatttctctttactggatgtttatttataaagatctggcctgttcctgcgtctgcggagcggcccttgtctcccagctatctataaccttagctagagtgtcgccttgtgggttcctgttgctgagacttcctggatggagccgccctcaccgwmcgkcccgtggccctgcgcggagctgtgtccaataaagttcttggatgtgaaaaa

SEQ ID NO: 50 - DNA, 563 bp, Homo sapiens
  misc_feature (510): n equals a,t,g, or c
  misc_feature (519): n equals a,t,g, or c
  misc_feature (530): n equals a,t,g, or c
  misc_feature (558): n equals a,t,g, or c
cggacgcgtgggcgccctccgaatccagagaggcgctgctgacaccgccgccacaccgccgccacaccgccgctgcctcagtcatgccgaagcacgagttctctgtggacatgacctgtggaggctgtgctgaagctgtctctcgggtcctcaataagcttggaggagttaagtatgacattgacctgcccaacaagaaggtctgcattgaatctgagcacagcatggacactctgcttgcaaccctgaagaaaacaggaaagactgtttcctaccttggccttgagtagcaggggcctggtccccacagcccacaggatggaccaaagggggcaggatgctgatcctcccgctggcttccagacagacctgggacttggcagtcatgccgggtgatggtgttcctgcggagaccctcagttgtcctattccttcctagcttccctgcaataaaatcaagctgcttttgttggaaaaaaaaaaaaaaaaagggggcgtctaaaaaccaanttatttccntgatgaaatcnacctctttgttcccattcatccggcctnaaaaa

SEQ ID NO: 51 - DNA, 3215 bp, Homo sapiens
  misc_feature (3196): n equals a,t,g, or c
gcctcgggtggggtgggagcgggggggacagtgccccgggaacccggtgggtcacacacacgcactgcgcctgtcagtagtggacattgtaatccagtcggcttgttcttgcagcattcccgctcccttccctccatagccacgctccaaaccccagggtagccatggccgggtaaagcaagggccatttagattaggaaggtttttaagatccgcaatgtggagcagcagccactgcacaggaggaggtgacaaaccatttccaacagcaacacagccactaaaacacaaaaagggggattgggcggaaagtgagagccagcagcaaaaactacattttgcaacttgttggtgtggatctattggctgatctatgcctttcaactagaaaattctaatgattggcaagtcacgttgttttcaggtccagagtagtttctttctgtctgctttaaatggraacagactcataccacacttacaattaaggtcaagcccagaaagtgataagtgcagggaggaaaagtgcaagtccattatgtaatagtgacagcaaagggaccaggggagaggcattgccttctctgcccacagtctttccgtgtgattgtctttgaatctgaatcagccagtctcagatgccccaaagtttcggttcctatgagcccggggcatgatctgatccccaagacatgtggaggggcagcctgtgcctgcctttgtgtcagaaaaaggaaaccacagtgagcctgagagagacggcgattttcgggctgagaaggcagtagttttcaaaacacatagttaaaaaagaaacaaatgaaaaaaattttagaacagtccagcaaattgctagtcagggtgaattgtgaaattgggtgaagagcttasgattctaatctcatgttttttccttttcacatttttaaaagaacaatgacaaacacccacttatttttcaaggttttaaaacagtctacattgagcatttgaaaggtgtgctagaacaaggtctcctgatccgtccgaggctgcttcccagaggagcagctctccccaggcatttgccaagggaggcggatttccctggtagtgtagctgtgtggctttccttcctgaagagtccgtggttgccctagaacctaacaccccctagcaaaactcacagagctttccgtttttttctttcctgtaaagaaacatttcctttgaacttgattgcctatggatcaaagaaattcagaacagcctgcctgtccccccgcactttttacatatatttgtttcatttctgcagatggaaagttgacatgggtggggtgtccccatccagcgagagagtttcaaaagcaaaacatctctgcagtttttcccaagtrccctgagatacttcccaaagcccttatgtttaatcagcgatgtatataagccagttcacttagacaactttacccttcttgtccaatgtacaggaagtagttctaaaaaaaatgcatattaatttcttcccccaaagccggattcttaattctctgcaacactttgaggacatttatgattgtccctctgggccaatgcttatacccagtgaggatgctgcagtgaggctgtaaagtggccccctgcggccctagcctgacccggaggaaaggatggtagattctgttaactcttgaagactccagtatgaaaatcagcatgcccgcctagttacctaccggagagttatcctgataaattaacctctcacagttagtgatcctgtccttttaacaccttttttgtggggttctctctgacctttcatcgtaaagtgctggggaccttaagtgatttgcctgtaattttggatgattaaaaaatgtgtatatatattagctaattagaaatattctacttctctgttgtcaaactgaaattcagagcaagttcctgagtgcgtggatctgggtcttagttctggttgattcactcaagagttcagtgctcatacgtatctgctcattttgacaaagtgcctcatgcaaccgggccctctctctgcggcagagtccttagtggaggggtttacctggaacattagtagttaccacagaatacggaagagcaggtgactgtgctgtgcagctctctaaatgggaattctcaggtaggaagcaacagcttcagaaagagctcaaaataaattggaaatgtgaatcgcagctgtgggttttaccaccgtctgtctcagagtcccaggaccttgagtgtcattagttactttattgaaggttttagacccatagcagctttgtctctgtcacatcagcaatttcagaaccaaaagggaggctctctgtaggcacagagctgcactatcacgagcctttgtttttctccacaaagtatctaacaaaaccaatgtgcagactgattggcctggtcattggtctccgagagaggaggtttgcctgtgatttcctaattatcgctagggccaaggtgggatttgtaaagctttacartaatcattctggatagagtcctgggaggtccttggcagaactcagttaaatctttgaagaatatttgtagttatcttagaagatagcatgggaggtgaggattccaaaaacattttatttttaaaatatcctgtgtaacacttggctcttggtacctgtgggttagcatcaagttctccccagggtagaattcaatcagagctccagtttgcatttggatgtgtaaattacagtaatcccatttcccaaacctaaaatctgtttttctcatcagactctgagtaactggttgctgtgtcataacttcatagatgcaggaggctcaggtgatctgtttgaggagagcaccctaggcagcctgcagggaataacatactggccgttctgacctgttgccagcagatacacaggacatggatgaaattcccgtttcctctagtttcttcctgtagtactcctcttttagatcctaagtctcttacaaaagctttgaatactgtgaaaatgttttacattccatttcatttgtgttgtttttttaactgcattttaccagatgttttgatgttatcgcttatgttaatagtaattcccgtacgtgttcattttattttcatgctttttcagccatgtatcaatattcacttgactaaaatcactcaattaatcaawaaaaaaaaaaaaaaccncgggggggggcccggaacc

SEQ ID NO: 52 - DNA, 626 bp, Homo sapiens
  misc_feature (571): n equals a,t,g, or c
  misc_feature (572): n equals a,t,g, or c
  misc_feature (573): n equals a,t,g, or c
  misc_feature (618): n equals a,t,g, or c
cagtttgtgtattgcggcaagaaggcccagctcaacattggcaatgtgctccctgtgggcaccatgcctgagggtacaatcgtgtgctgcctggaggagaagcctggagaccgtggcaagctggcccgggcatcagggaactatgccaccgttatctcccacaaccctgagaccaagaagacccgtgtgaagctgccctccggctccaagaaggttatctcctcagccaacagagctgtggttggtgtggtggctggaggtggccgaattgacaaacccatcttgaaggctggccgggcgtaccacaaatataaggcaaagaggaactgctggccacgagtacggggtgtggccatgaatcctgtggagcatccttttggaggtggcaaccaccagcacatcggcaagccctccaccatccgcagagatgcccctgctggccgcaaagtgggtctcattgctgcccgccggactggacgtctccggggaaccaagactgtgcaggagaaagagaactagtgctgagggcctcaataaagtttgtgtttatgccaaaaaaaaaaaaaaaaannnggggggccgctttaragrwtcctccaaggggccaacttacccttncatgcaaa

SEQ ID NO: 53 - DNA, 920 bp, Homo sapiens
  misc_feature (617): n equals a,t,g, or c
  misc_feature (621): n equals a,t,g, or c
  misc_feature (725): n equals a,t,g, or c
atgagggctcggctacagcaagaagtagaggagcagctcaaaaagaaatgtttcactctgctctgctactatgatcccaattcagatgctgacagtgaaaccgtgaaggcagcaaaggtgtggaaactcgcagagtcctggtgggtgagcagcagcagtgccasgatgccaagagccagcagaaggagcagatgttgctgctggagaakaagagtgctgcttactcccaggtgcttctccgctgcctcactttgctgcagaggcttcttcaagaacaccggctgaagactcaatccgagctagaccgcatcaatgcccagtacctggaagtcaagtgcggtgctatgatccttaagctgaggatggaggagctaaagattttgtccgacacttacactgttgagaaagtggaagttcatcgtctgattagggaccgtttggagggagccattcacctacaggagcaggacatggagaactcaagacaggtcctgaactcctatgaggtccttggggaggagtttgacaggctggtgaaagagtacaccgtactcaagcaggcaacagagaacaagcggtgggccctccaggagttcagcaaggtctaccgttgagcntcgncagggccaggagacatggcttctgcatagctgctgcctcctaatcttcctgctagtgggaccaccttcacctggggctgccttcagtacaagggagtgtggaanatsttacgcttgaaacactgcagtcatttaggcactctcctggtttctctttattttttatgactgggcctcttctggaaaatctagcaaggagatttatataatttttatgcatagctgtgtgtcagtgtcagccctgtattgtatttgattatctcctgaataaagttatgatattawaaaaaaaaaaaaaaa

SEQ ID NO: 54 - DNA, 1090 bp, Homo sapiens
  misc_feature (1024): n equals a,t,g, or c
  misc_feature (1034): n equals a,t,g, or c
gagtaacccagaaatgatgttgcattttttgctttacctgataattgaaactttcaacaatctctggagtgactttttctcctcgaattgaaacaagtctatggcaaaagaagctgcatttttttcacaaaagggaagatggtaacaatggtcacttcaaacttttgggctaaattatatgtacacagaaatgttcaaaatcatagttttaatgtgttttgaaaaggccacacaattatactttatcttttcttaataatcctgcaaatctctgccctggaatccgaaatctgaaaatgtactggcttgaacaaaatttgttttgtgtgttagagttataaatcattaatctttatttcgggtggtttacgtttatgccagttcctttatatttaaatttcttgttttatatattttgaatgtctttatagatttctttaaatttccttatagaaccattaatagaaaatcattacatttaaaatataccttacagcaaaagcatccaaataagtatagggtttatgtccttatttttctttcagctgaatacgaatgaacacagtggtggaatttctgaagggaagtgatgaaattatatttatttcagtgggcacttttccattttaccactgtaccattatttggttcctggagttatacactaattttcagtatattactgttaaattaccaacacaaggcaatttatttgaaagattccgtttatcctgccattgctttgaaaagcagcaggaaacgaaatcctttgacttgtatcagcttctgcagagcatctttgttttcctttgtcctttgtttcctaccttttgaatcagattccgttttagtcaggaagacttcttgggaccattcttagtaacctgaaatttcttttttaattgcatgaagtggattgatcatgagcaaatgatgtgcttatttctccctcactgttgaatatctttgaacttgctgttttcaatatgggcagcacaaaggtgagagatacatattaatagtngtatgtattnctcttatacattagatacctatatttaaatgaaagggccaatttgtaaacatatac

SEQ ID NO: 55 - DNA, 1464 bp, Homo sapiens
  misc_feature (766): n equals a,t,g, or c
ccgctccggaattcccgggtcgacccacgcgtccgcccacgcgtcgcccacgcgtccggggacgctctcagctctcggcgcacggcccagcttccttcaaaatgtctactgttcacgaaatcctgtgcaagctcagcttggagggtgatcactctacacccccaagtgcatatgggtctgtcaaagcctatactaactttgatgctgagcgggatgctttgaacattgaaacagccatcaagaccaaaggtgtggatgaggtcaccattgtcaacattttgaccaaccgcagcaatgcacagagacaggatattgccttcgcctaccagagaaggaccaaaaaggaacttgcatcagcactgaagtcagccttatctggccacctggagacggtgattttgggcctattgaagacacctgctcagtatgacgcttctgagctaaaagcttccatgaaggggctgggaaccgacgaggactctctcattgagatcatctgctccagaaccaaccaggagctgcaggaaattaacagagtctacaaggaaatgtacaagactgatctggagaaggacattatttcggacacatctggtgacttccgcaagctgatggttgccctggcaaagggtagaagagcagaggatggctctgtcattgattatgaactgattgaccaagatgctcgggatctctatgacgctggagtgaagaggaaaggaactgatgttcccaagtggatcagcatcatgaccgagcggagtgnccccacctccagaaagtatttgataggtacaagagttacagcccttatgacatgttggaaagcatcaggaaagaggttaaaggagacctggaaaatgctttcctgaacctggttcagtgcattcagaacaagcccctgtattttgctgatcggctgtatgactccatgaagggcaaggggacgcgagataaggtcctgatcagaatcatggtctcccgcagtgaagtggacatgttgaaaattaggtctgaattcaagagaaagtacggcaagtccctgtactattatatccagcaagacactaagggcgactaccagaaagcgctgctgtacctgtgtggtggagatgactgaagcccgacacggcctgagcgtccagaaatggtgctcaccatgcttccagctaacaggtctagaaaaccagcttgcgaataacagtccccgtggccatccctgtgagggtgacgttagcattacccccaacctcattttagttgcctaagcattgcctggccttcctgtctagtctctcctgtaagccaaagaaatgaacattccaaggagttggaagtgaagtctatgatgtgaaacactttgcctcctgtgtactgtgtcataaacagatgaataaactgaatttgtactttaraaaaaaaaaaaaaaaaactyrggggggggcccgkacccattggccttag

SEQ ID NO: 56 - DNA, 985 bp, Homo sapiens
  misc_feature (647): n equals a,t,g, or c
  misc_feature (875): n equals a,t,g, or c
  misc_feature (962): n equals a,t,g, or c
  misc_feature (973): n equals a,t,g, or c
agaagttgctagtgttcaatgcagctggggtgaaaccccaggggcaaggtggctggctttgatctggacgggacgctcatcaccacacgctctgggaaggtctttcccactggccccagtgactggaggatcttgtacccagagattccccgtaagctccgagagctggaagccgagggctacaagctggtgatcttcaccaaccagatgagcatcgggcgcgggaagctgccagccgaggagttcaaggccaaggtggaggctgtggtggagaagctgggggtccccttccaggtgctggtggccacgcacgcaggcttgtaccggaagccggtgacgggcatgtgggaccatctgcaggagcaggccaacgacggcacgcccatatccatcggggacagcatctttgtgggagacgcagccggacgcccggccaactgggccccggggcggaagaagaaagacttctcctgcgccgatcgcctgtttgccctcaaccttggcctgcccttcgccacgcctgaggagttctttctcaagtggccagcagccggcttcgagctcccagcctttgatccgaggactgtctcccgctcagggcctctctgcctccccgagtccagggccctcctgagcgccacccggangtggttgtcgcagtgggattccctggggccgggaagtccacctttctcaagaagcacctcgtgtcggccggatatgtccacgtgaacagggacacgctaggctcctggcagcgctgtgtgaccacgtgtgaracagccctgaagcaagggaaacgggtcgccatcgacaacacaaacccagacgccgcgagccgcgccaggtacgtccartgtgcccgagccgcgggngtacccctgccgctgcttcctcttcaccgccactctggagcaggcgcgccacaacaaccgggtgagcccgcttcagcccgggacacnccccggggatngcaccccctgga

SEQ ID NO: 57 - DNA, 1246 bp, Homo sapiens
ctcagagtcgcgaggccggacgcagcgcgcgccgccccactcgccccagccgccgccatgaaggccgtggtgcagcgcgtcacccgggccagcgtcacagttggaggagagcagattagtgccattggaaggggcatatgtgtgttgctgggtatttccctggaggatacgcagaaggaactggaacacatggtccgaaagattctaaacctgcgtgtatttgaggatgagagtgggaagcactggtcgaagagtgtgatggacaaacagtacgagattctgtgtgtcagccagtttaccctccagtgtgtcctgaagggaaacaagcctgatttccacctagcaatgcccacggagcaggcagagggcttctacaacagcttcctggagcagctgcgtaaaacatacaggccggagcttatcaaagatggcaagtttggggcctacatgcaggtgcacattcagaatgatgggcctgtgaccatagagctggaatcgccagctcccggcactgctacctctgacccaaagcagctgtcaaagctcgaaaaacagcagcagaggaaagaaaagaccagagctaagggaccttctgaattcaagcaaggaaagaaacactccccgaaaagaagaccgcagtgccagcagcggggctgagggcgacgtgtcctctgaacgggagccgtagctcaggaggcagaattcagtgtgttatcattgggcagaactggatcctgaaaaattcaagatgctaagcacctacactactttaagaatttggaactgaaacatgaagaggaagacagaaataagaatttgggaacctgaatagctctgcaaaaaacaccaaaggaccgttttatcgttttctgttgttgctgtggtggagtgatgcagtgggcactkccsgtgggccagggggcgggtgcgcatgtggtagaaggtgtgcgctcgtgcctcccccacagaaaggctttgttggtttctaccacatcttggcttgcttttggaacaggctggccccagcatcatttgtcatcaagtccactgtggtgtattctgcgtgtccatggcgggggttctccaayacactcacactgtccatgttctttttattgccagggcccgtgttgaagtgtcaagagagcaatcatcaatgataatgtattgtgtgagacctttgcatcttgtaaattttctcttttttctaaaaataaataataataaaatcctaaatctcaacaaa

SEQ ID NO: 58 - DNA, 1966 bp, Homo sapiens
  misc_feature (1926): n equals a,t,g, or c
  misc_feature (1942): n equals a,t,g, or c
gggagaaagatccttcactcacagaaccagttattagggggttaatgaaattttggcctaaaacatgtagtcaaaaagaggtcatgttccttggggactggaagaaatattggatgtgattgaaccttcacaatttgttaaaatccaagaacctttgtttaaacaaatcgccaagtgtgtatctagcccccattttcaggtggcagaaagagcactctattattggaataatgaatacatcatgagtttgatagargaaaactctaacgtcatccttcccatcatgttttccagcctttataggatttcaaaagaacattggaatccggctattgtggcgttggtgtacaatgtgttgaaggcatttatggaaatgaacagcaccatgtttgacgagctgacagccacatacaagtcagatcgtcagcgtgagaaaaagaaagaaaaggagcgtgaagaattgtggaaaaaattggaggatctggagttaaagagaggtcttagacgtgatggaataattccaacttaacaaaaacaatgacaacaacattactaacctgtggagtcacacgtttatgtagtagaagatggagcaacagttttctgtattgtgcaactttacagtagatttcacctttgtttcattattacagcagcactgtatatacctgtctctaagtaaaggaaaaaacaaaataaggacttcaatccaaagtttggacagtagatggacttctcagaactttgcaaacataatcattgttctcaccctcttttaaaaaaaaaaatcggtcttcaaagatctgttgatgaaattgctatgttaaaattccattatcgggagttccttatttatcactagcagagagtatgatacaattttcaaatgtgaacaatcttaaatttagcttgtctttctgctaagctgttaaatgtatttatagtaaaggaagaaaaaaagactgtcatttccttataagtttgtgtaacatcctcctctggataacttgactgtaatttracatctttttcttttgcacatcttcctgagttgaatgtccacgtggaatggggtcatgaattataaaagtccctgataaaagttttgtttactggggtgaacatctttccagtaaccaggtagtcctggtactcctttagttttaaaattaggagttaagagagaagaggtgataaacatagtagggaagggaatatcggattcatgcatcagtttatggtgaatccaaatcaatgtcttgaatcctttgaaaacaggcactgggacatcacaggcttcagtacctgaccagtattagttgcatatatcattgaacacacataccagagatgttttagaaatgtgagaaaaacatccttttggaccatttgaaataagaaagacaaacactaaacaatacaaccatgaaattgatcaccgggattgcaaatctaattgggaaaagagttgagcaaacagcttggactgtttggagttgttgccttactttttaatatgtatttataaagtattccagcaaaagaggatgtagcctctgggaaaaaacaaacatgttacagtgttttttgtagattctcgttctatatctcatcacagcgccagccctgtttttagccggaaaggattcaggataaacattattatgcattctgaattggatgcatattcctaactactgtatttgttaccaaaagtggttctacaaatgctactgaaaaaaatctggaaattcctaatgtcctgagtattaataataaagtttaaaaatgcttttatatcaaaggtgcatcgtgaccaaattgtttaaaaaaaaaaaacaaaaaaaacaaaatctagggctgtattttatatatatatatatatatatatatatatatatatatatatatatatatgtccttatnggactctctgctttgntatttaaataaaaaatcttacatc

SEQ ID NO: 59 - DNA, 1611 bp, Homo sapiens
  misc_feature (7): n equals a,t,g, or c
cgcgtcngtgcgaattcggcacgaggggacttcccagagctcacaatggaggttgatggtaaggtagagtcaattatgaagaggacagctttggtagccaatacctccaatatgcctgttgctgctagagaagccyctatttatactggaatcacactgtcagagtacttccgtgacatgggctatcatgtcagtatgatggctgactctacctctagatgggctgaggccttagagaaatctctggtcgtttagctgaaatgcctgcagatagtggatatccagcctatcttggtgcccgtctggcctcgttttatgaacgagcaggcagggtgaaatgtcttggaaatcctgaaagagaagggagtgtcagcattgtaggagcagtttctccacctggtggtgatttttctgatccagttacatctgccactcttggtatcgttcaggtgttctggggcttagataagaaactagctcaacgtaagcatttcccctctgtcaattggctcatcagctacagcaagtatatgcgtgccttggatgaatactatgacaaacacttcacagagttcgttcctctgaggacgaaagctaaggaaattctgcaggaagaagaagacctggcagaaattgtacagcttgtgggaaaggcttctttggcagaaacagataaaatcactctggaggtagcaaaacttatcaaagatgatttcctacaacaaaatggatatactccttatgacaggttctgcccattctacaagacagtagggatgctgtccaacatgattgcattttatgatatggctcgtagagtgtttgaaaccactgcccagagtgacaataaaatcacatggtccattattcgtgagcacatgggagacatcctctataaactttcctccatgaaattcaaggatccactgaaagatggtgaggcaaagatcaaaagcgactatgcacaacttcttgaagacatgcagaatgcattccgtagccttgaagattagaagccttgaagattacaactgtgatttccttttcctcagcaagctcctatgtgtatattttcctgaatttctcatctcaaaccctttgcttctttattgtgcagctttgagactagtgcctatgtgtgttatttgtttccctgtttttttggtaggtcttatataaaacaaacattcctttgttctagtgttgtgaagggcctccctcttcctttatctgaagtggtgaatatagtaaatatacattctggttacactactgtaaacttgtatgtagggtgatgaccctctttgtcctaggtgtaccctttcctcatctctattaaattgtaaacaggactactgcatgtactctctttgcagtgaatttggaatggaaggccaggtttctataacttttgaacaggtactttgtgaaatgactcaatttctattgtggtaagctcattggcagcttagcattttgcaaaggaattgctttgcaggaaatatttaattttcaaaaacataatgattaatgttccaattatgcatcacttcccccagkataaaycaggaatgkttgtgagaaaccattgggaactatactcttttttaa

SEQ ID NO: 60 - DNA, 1849 bp, Homo sapiens
  misc_feature (100): n equals a,t,g, or c
  misc_feature (977): n equals a,t,g, or c
  misc_feature (1846): n equals a,t,g, or c
gattcccgggtcgacccacgcgtccgcgcggaatctcagttagcggtggagaggcagtatgtccggttcaatggcgactgcggaagctagcggcagcgantgggaaagggcaggaagtcgagacctcagtcacctattaccggttggaggaggtggcaaagcgcaactccttgaaggaactgtggcttgtgatccatgggcgagtctacgatgtcacccgcttcctcaacgagcaccctggaggagaagaggttctgctggaacaagctggtgtagatgcaagtgaaagctttgaagatgtaggacactcttctgatgccagagaaatgctaaagcagtactacattggtgatatccatccgagtgaccttaaacctgaaagtggtagcaaggacccttcaaaaaatgatacatgcaaaagttgctgggcatattggattttacccatcataggcgctgttctcttaggtttcctgtaccgctactacacatcggaaagcaaatcctcctgaggaggccttgctgaagttagaaagtgcatccactttggggcgaaaactagagacttgcttgggggctgcagaagtgccctctcctcgaatcctgccagttgcattcttcccccttggagccaagacgattggccagacatcacctcagatctgagaccagcgtcttccatctctcagagccttactcccaaagtacctgctcactgttccgtgttgaacaattgccggtgtttcctctcttcactggtttccatgagtacccttatatttcacaactttctgttcataagttatagtgacattgctctttggtaaaaatgcctgctttccaatactttgattgcatattagacattcttaacagggcggcagtctagtgttgaaagttttatttttccatttttcttttaagtaaattttttttaaaaaattctgatttagggctaggtgtggtggctcaggccngtaatcckggcacttkgggrggccaaggtgggaagatcgsttgaggccaagagttcaagaccagcctgggcaacatagcgagacccctatctgtattaaaaaaaaatctgatttaattcttttatttatcataaggggtttaattcctgaagtaaaggtttgcacctattaaacttaaaactgccaaatgatttttgttcttttatgtgcgtgataaaaatacaaagaatggtgtggccacctcctccctttcaagctagggcagcaggtagctcttcccagcccctgagcccagccccttcccaagtggtgccggacaaaaaactacatggccctttcgtgtcttgggggtggaaagggagggatgaattggggtgatagaaccctggtgaattcagagtaatctttctttagaaaactggtgttttctaaagaaacaggataggagtttagagaaggcaccaaagctttcactttggtttggcaccagtttctaaccatctgttttttctaccctagctatcttttattggtaaaatataaatgtataattatgtttgtagagctttaccaaggagtttccctccttttttgtttgttgattagcaaatttttgattctccattttccaaaagtaagagactccagcatggccttctgtttgccccgcagtaaagtaacttccatataaaatggtatttgaaagtgagagttcatgacaacagaccgttttccatttcatctgtattttatctccgtgactccaacttgtgggtttgttctgtttttccatgagaataaaatactggcggtttttttcaaaaaaaaaaaaaaaaaaaaaaaaaaaaaaaaaaaaaaaaaaaaagggngga

SEQ ID NO: 61 - DNA, 233 bp, Homo sapiens
aagggtcggcctctcaaagtgctgggattacaggcattagccactgtgcctggccaagaataaaaattttttaatcttgagaaraaacatacagktcatacatataaaaagccttgaaaatattattccctttgactcactaattacactgctggaatataaagaaatgatcctaaatatatatgtagttttatggtcctaaatatgtataaagctttatgatcactcgtgcc

SEQ ID NO: 62 - DNA, 2333 bp, Homo sapiens
  misc_feature (3): n equals a,t,g, or c
  misc_feature (6): n equals a,t,g, or c
  misc_feature (7): n equals a,t,g, or c
  misc_feature (14): n equals a,t,g, or c
  misc_feature (2327): n equals a,t,g, or c
  misc_feature (2331): n equals a,t,g, or c
cgncgnnccgcgancccacgcgtccggtggaagatatgtggacttagtcccactacaaccttagccatatattttgaggttgtcaatcagcataatgctccaattcytcaaggagggcgtggtgcaatccagtttgtgactcagtatcagcattcaagtgggcagagacgcatccgagtgaccaccattgctaggaactgggcagatgctcaaactcaaatccaaaacattgctgcatcttttgaccaggaggcagctgccattcttatggcccggctagcaatatatagagcagaaacagaagaaggtccagatgtgcttaggtggctggacagacagctcattcgactgtgtcagaaatttggagaatatcataaagatgacccaagttccttcagattttcagaaactttctccctttatccacagtttatgtttcatttaagaagatcttctttcctgcaagtttttaacaatagtcctgatgagagttcatattatcgtcaccattttatgcgtcaagatctgacccagtctctaattatgattcagcctatcctgtatgcgtattcttttagtggaccaccagagccggttcttcttgatagcagtagcattcttgcagatcgtattcttctcatggacacattcttccagattttgatttatcatggtgagaccatagcacagtggcggaagtcaggataccaggatatgcctgagtatgaaaatttccgccaccttctgcaagccccagtggatgatgcacaggaaattcttcactccagatttccaatgccaagatacattgacactgaacatggaggcagccaggcccgtttcctcctttcaaaagtcaacccttcacagactcataataatatgtatgcctgggggcaggagtctggagcacctattcttacagatgatgttagtttacaagtgtttatggatcacttgaagaaacttgctgtgtccagtgctgcttgaagtgctaataatgttaaagacacttaagaagatgaaataatattcaaatttcattttttcctttttccatttatctgtggaaaccaacagatattgctctatattttttgtattagtatggtttgagacaacatatggaaaatgttcacatttgtagattaagctggaattataatgagagcaataagaacaaatttattttgcttaccacagtgttatagctggttctagaaatttgaagtctttataacttaattatgtttaataaaaaatagagtctgcctcgtactacagatgtaactcatttgtatattgcagacagacccaaagtggcactgaattttcttgctcaccttttaaaaacttgttccttaattttagccagaaagcaaaaaaacaatagtaatgataaatgtgaacatttttgcttattcattgaatatttttctgtaattttcagcacttatgtatacactttttctgtacttactaggttaaggcagatttatttttatgatttgtttaggaattatttgattttataatggtaattttcatgatgataatgtttttggttatttggaaagatagtttagagatgaaaggtttttttgggtaacaatcccgcagctgacaaaaaatgtgaaatttccacaaaatatccaacttatgtgactaaacgcagtagtttttttaaaaggggagatagaaaataaatggttttgttggagtgcattttagtaagcctttgcagtaaaatgacggttgtaactactaaaccaaatttagttttcacagcatggttttgttgttttccccttgtttttcagaggtaaattttgcattatatccttcagtattttaacactattttggcagtttacacattactttttgtttttccttcctttttgtgaaatgtattaagttgtggttcttattgaaacagtattatataatgtttgcttaattatatcatgtgatgctcagttctattttgatttattcattagtattcacttttacctttaaagtttacttgtagcaaatatgtttacattgataaagccagatatgttttgacaatgaaatttacatatcaagtactgcaaataaaaggtggtgctatgatatatgcttaggaggacagttttaatgattgtacttgcatgaacacaatcatatgatggtaaagcagaaacttaagaaaaaattgtttatgtgttatattcaattagcttaaataagttgctttgttatattttatttgaattgaactacgctaggcctaaatgccaataaaatatacttttcactgttaaaaaaaaaaaataaanaccnta

SEQ ID NO: 63 - DNA, 1470 bp, Homo sapiens
  misc_feature (1410): n equals a,t,g, or c
  misc_feature (1414): n equals a,t,g, or c
  misc_feature (1419): n equals a,t,g, or c
gcttcctgctgcccaccctgtggttctgcagccccagtgccaagtacttcttcaagatggccttctacaatggctggatcctcttcctggctgtgctcgccatccctgtgtgtgccgtgcgaggacgcaacgtcgagaacatgamgatcttgcgtctaatgctgctccacatcaaatacctgtacgggatccgagtggaggtgcgaggggctcaccacttccctccctcgcagccctatgttgttgtctccaaccaccagagctctctcgatctgcttgggatgatggaggtactgccaggccgctgtgtgcccattgccaagcgcgagctactgtgggctggctctgccgggctggcctgctggctggcaggagtcatcttcatcgaccggaagcgcacgggggatgccatcagtgtcatgtctgaggtcgcccagaccctgctcacccaggacgtgagggtctgggtgtttcctgagggaacgagaaaccacaatggctccatgctgcccttcaaacgtggcgccttccatcttgcagtgcaggcccaggttcccattgtccccatagtcatgtcctcctaccaagacttctactgcaagaaggagcgtcgcttcacctcgggacaatgtcaggtgcgggtgctgcccccagtgcccacggaagggctgacaccagatgacgtcccagctctggctgacagagtccggcactccatgctcactgttttccgggaaatctccactgatggccggggtggtggtgactatctgaagaagcctgggggcggtgggtgaaccctggctctgagctctcctcccatctgtccccatcttcctccccacacctacccacccagtgggccctgaagcagggcmaaaccctcttccttgtctcccctctccccacttattctcctctttggaatcttcaacttctgaagtgaatgtggatacagcgccactcctgccccctcttggccccatccatggactcttgcctcggtgcagtctccactcttgacccccacctcctactgtcttgtctgtgggacagttgcctccccctcatctccagtgactcagcctacacaagggaggggaacattccatccccagtggagtctcttcctatgtggtcttctctacccctctaccccacattggccagtggactcatccattctttggaacaaatcccccccactccaaagtccatggattcaatggactcatccatttgtgaggaggacttctcgccctctggctggaagctgatacctgaagcactcccaggctcatcmtgggagctttcctcagcaccttcaccttccctcccagtgtagcctcctgtcagtgggggctggacccttctaattcagaggtctcatgcctgcccttgcccagatgnccangggtngtgcamtytytggggataccagttcagtctccamatttytgggtttytggt

SEQ ID NO: 64 - DNA, 939 bp, Homo sapiens
  misc_feature (3): n equals a,t,g, or c
  misc_feature (4): n equals a,t,g, or c
  misc_feature (11): n equals a,t,g, or c
agnntaccggntccggaattcccgggtcggacccacgcgtccggtctcctcagaagtcgcttagctcttcggtggttgtcacacgtccggaggcctagccgtcgcgtacctaggatgccgcgtggaagccgaagccgcacctcccgcatggcccctccggccagccgggcccctcagatgagagctgcacccaggccagcaccagtcgctcagccaccagcagcggcacccccatctgcagttggctcttctgctgctgcgccccggcagccaggtctgatggcccagatggcaaccactgcagctggcgtggctgtgggctctgctgtggggcacacattgggtcacgccattactgggggcttcagtggaggaagtaatgctgagcctgcgaggcctgacatcacttaccaggagcctcagggaacccagccagcacagcagcagcagccttgcctctatgagatcaaacagtttctggagtgtgcccagaaccagggtgacatcaagctctgtgagggtttcaatgaggtgctgaaacagtgccgacttgcaaacggattggcctaatgaagaagttcaacctggagagatggaaaatcagctctcataactaagttaatttagtataaaaatagaattgatagtgagggtataaagtgtaaccatcagttaaacctctcctgtcattcctagcttccttgcttcagaattgaaatggaagtgggggtgtccctactctgtagaatctgggactgggcaaatgtttgtgtggcctccttaaactagctgttatgttatgattttattctttgtgagttaattagaataaagtcattttcttccaaggtatggttcatttagtctatagtctctggttatgaaattagcatcctcccagatctgacagctccctgaggggttatataaggagtagct

SEQ ID NO: 65 - DNA, 2068 bp, Homo sapiens
  misc_feature (308): n equals a,t,g, or c
gtaggaagtgtctgtagccgcagctgcgsgtccgggattcccagccatggcagattcctccgggcagcaggctcctgactacaggtccattctgagcattagtgacgargcagccagggcacaagccctgaacgagcacctcagcacgcgtagtatgtccaggggtactcactgtcccaggcagacgtggacgcgttcaggcagctctcggccccgcccgctgacccccagctcttccacgtggctcggtggttcaggcacatagaagcgctcctgggtarcccctgtggcaaaggccagccctgcangctyccaagcargcaaaggccggcgtgtgcagccccagtggtcccctcctgctgggacccascatgcagactccacctttacaacagcctcaccaggaacaaggaagtgttcatacctcaagatgggaaaaaggtgacgtggtattgctgtgggccaaccgtctatgacgcatctcacatggggcacgccaggtcctacatctcttttgatatcttgagaagagtgttgaaggattacttcaaatttgatgtcttttattgcatgaacattacggatattgatgacaagatcatcaagagggcccggcagaaccacctgttcgagcagtatcgggagaagaggcctgaagcggcacagctcttggaggatgttcaggccgccctgaagccattttcagtaaaattaaatgagaccacggatcccgataaaaagcagatgctcgaacggattcagcacgcagtgcagcttgccacagagccacttgagaaagctgtgcagtccagactcacgggagaggaagtcaacagctgtgtggaggtgttgctggaagaagccaaggatttgctctctgactggctggattctacacttggctgtgatgtcactgacaattccatcttctccaagctgcccaagttctgggagggggacttccacagagacatggaagctctgaatgttctccctccagatgtcttaacccgggttagtgagtatgtgccagaaattgtgaactttgtccagaagattgtggacaacggttacggctatgtctccaatgggtctgtctactttgatacagcgaagtttgcttctagcgagaagcactcctatgggaagctggtgcctgaggccgttggagatcagaaagcccttcaagaaggggaaggtgacctgagcatctctgcagaccgcctgagtgagaagcgctctcccaacgactttgccttatggaaggcctctaagcccggagaaccgtcctggccgtgcccttggggaaagggtcgtccgggctggcatatcgagtgctcggccatggcaggcaccctcctaggggcttcgatggacattcacggaggtgggttcgacctccggttcccccaccatgacaatgagctggcacaktcggaggcctactttgaaaacgactgctgggtcaggtacttcctgcacacaggccacctgaccattgcaggctgcaaaatgtcaaagtcactaaaaaacttcatcaccattaaagatgccttgaaaaagcactcagcacggcagttgcggctggccttcctcatgcactcgtggaaggacaccctggactactccagcaacaccatggagtcagcgcttcaatatgagaagttcttgaatgagtttttcttaaatgtgaaagatatccttcgcgctcctgttgacatcactggtcagtttgagaagtggggagaagaagaagcagaactgaataagaacttttatgacaagaagacagcaattcacaaagccctctgtgacaatgttgacacccgcaccgtcatggaagagatgcgggccttggtcagtcagtgcaacctctatatggcagcccggaaagccgtgaggaagaggcccaaccaggctctgctggagaacatcgccctgtacctcacccatatgctgaagatctttggggccgtagaagaggacagctccctgggattcccggtcggagggcctggaaccagcctcagtctcgaggccacagtcatgccctaccttcaggtgttat

SEQ ID NO: 66 - DNA, 1391 bp, Homo sapiens
  misc_feature (1): n equals a,t,g, or c
  misc_feature (16): n equals a,t,g, or c
  misc_feature (20): n equals a,t,g, or c
  misc_feature (25): n equals a,t,g, or c
  misc_feature (27): n equals a,t,g, or c
  misc_feature (1343): n equals a,t,g, or c
  misc_feature (1358): n equals a,t,g, or c
nccacgcgtccgcggnacgntgggngnttttaaaatgggtttttttgttgttgttgatggggggggagagggtccagcattttttaaatgttttcacatcgtgtgttccaaaaataactggttagcctaagtcacttccaccctccaatgttgtgaatgcagtctctagcattcgctatttaatgtcttcttcctgcactatttgagaaatcgcgaggtcgacttaataccgcagtcgccacttcgcggaccggaggcggagtctgcttagttctgaggactgcgtgggtccgcgcagagagctcctgctaggcctgcgcgtcccgttctaaattcttaccctttagtycttgtcaccacccccgccgtgggaacggcctgacagtcactcgtcaaaggaagtggctgccggcagctcttgacccggaatcggatcctagtcccaccccctccgctccaggcttccttctgcaacaggcgtgggtcacgctctcgctcggtctttctgccgccatcttggttccgcgttccctgcacaaaatgcccggcgaagcacagaaaccgtccctgctacagagcaggagttgccgcagccccaggctgagacagggtctggaacagaatctgacagtgatgaatcagtaccagagcttgaagaacaggattccacccaggcaaccacacaacaagcccagctggcggcagcagctgaaatcgatgaagaaccagtcagtaaagcaaaacagagtcggagtgaaaagaaggcacggaaggctatgtccaaactgggtcttcggcaggttacaggagttactagagtcactatccggaaatctaagaatatcctctttgtcatcacaaaaccagatgtctacaagagccctgcttcagatacttacatagtttttggggaagccaagatcgaagatttatcccagcaagcacaactagcagctgctgagaaattcaaagttcaaggtgaagctgtctcaaacattcaagaaaacacacagactccaactgtacaagaggagagtgaagaggaagaggtcgatgaaacaggtgtagaagttaaggacatagaattggtcatgtcacaagcaaatgtgtcgagagcaaaggcagtccgagccctgaagaacaacagtaatgatattgtaaatgcgattatggaattaacaatgtaaccatatggaagcaactttttttggtgtctcaaaggagtaactgcagcttggtttgaaatttgtactgtttctatcataaataaagttatggcttcttgttggatgaaaaaaaaaaaaaaaaaaaaaaaaaaaaaaaaaaaaaaaaaaaaaaggcgnggccgcaggcttttnccctttggtgggggttatttttggcttggccct

SEQ ID NO: 67 - DNA, 659 bp, Homo sapiens
  misc_feature (139): n equals a,t,g, or c
  misc_feature (475): n equals a,t,g, or c
  misc_feature (585): n equals a,t,g, or c
gcaaggctgctgctatggggccgggcggcgtgtggcgcggctgctcgccccactaatgtggcgcagggcggtttcctcggtggcggggtccgcggttggagccgagcccgggcttcggctgctggccgtgcagcgyttncccgtagagcagcgttctgccgggcttgccagaccccaaactttgtccgcggcctgcacagcgaagcctgggctggaggagcgggcggaggggacggtcaacgagggacgcccagaatcggacgcggcagatcatactggtcccaagtttgacatcgatatgatggtttcacttctgaggcaagaaaatgcaagagacatttgtgtgatccargttcctccagaaatgagatatacagattactttgtgattgttagtggaacttctacccgacacttacatgccatggcyttctacgttgtgaaaatgtacaaacacctgaaatgtaaacgtganccctcatgttaagatagaagggaaggacactgatgactggctgtgcgtggattttggcagcatggtggattcatttgaatgcttccagaaaaccagagaaatctatgganttagagaaattatggaccctacgttcttatgaatgaccagttagctcagatagcacctgaggacagtacctgta

SEQ ID NO: 68 - DNA, 2981 bp, Homo sapiens
  misc_feature (2858): n equals a,t,g, or c
  misc_feature (2948): n equals a,t,g, or c
ggcagaggttttccggcctgagaaaccgtcatgtttctggggagtcacctcagctggcagttaccaccgtgttagaaagcagcctcaggaccggccacctccatcactggcgtcaccatgggggctgtgctgggtgtcttctccctcgccagctgggttccatgcctctgcagcggtgcctcatgtttgctgtgtagttgctgtcctaacagtaagaattccacggtgactcgcctcatttatgctttcattctcctcctgagcactgtcgtatcctatatcatgcagagaaaagagatggaaacttacttgaagaagattcctggattttgtgaagggggatttaaaatccatgaggctgatataaatgcagataaagattgtgatgtgctggttggttataaagctgtgtatcggatcagctttgccatggccatctttttctttgtcttttctctgctcatgttcaaagtaaaaacaagtaaagatctccgagcggcagtacacaatgggttttggttcttcaaaattgctgcccttattggaatcatggttggctctttctacatccctgggggctatttcagctcagtctggtttgttgttggcatgataggggccgccctcttcatcctcattcagctggtgctgctggtagattttgctcattcttggaatgaatcatgggtaaatcgaatggaagaaggaaacccaaggttgtggtatgctgctttactgtctttcacaagcgccttttatatcctgtcaatcatctgtgtcgggctgctctatacatattacaccaaaccagatggctgcacagaaaacaagttcttcatcagtattaacctgatcctttgcgttgtggcttctattatatcgatccacccaaaaattcaggaacaccagcctcgctccggcctcttgcagtcctccctcatcaccctctacactatgtacctcacctggtcagccatgtccaatgaacctgatcgttcctgcaatcccaacctgatgagctttattacacgcataactgcaccaaccctggctcctggaaattcaactgctgtggtccctacccctactccaccatcaaagagtgggtctttactggattcagataattttattggactgtttgtctttgttctctgcctcttgtattctagcatccgcacttccactaatagccaagtagacaagctgaccctgtcagggagtgacagcgtcatccttggtgatacaactaccagtggtgccagtgatgaagaagatggacagcctcggcgggctgtggacaacgagaaagagggagtgcagtatagctactccttattccacctcatgctctgcttggcttccttgtacatcatgatgaccctgaccagctggtacagccctgatgcaaagtttcagagcatgaccagcaagtggccagctgtgtgggtcaagatcagctccagctgggtctgcctcctgctttacgtctggacccttgtggctccacttgtcctcaccagtcgggacttcagctgaacctctgagtgccaaggacaccactggaactcacaaaggtctccttcaccgaaaacccatataccttttaagtttgtttcaactaaaatattaagtgaatgctttgcaagtttgactgtatgcaggtttatatcagaaggtgagattgaataatgcttgatgcagaatcgaaacttctcatttatctgtatattatgtttacttctaaggatatagcacaaagggaacattttttgtttaaagtgaactacagctgtgctgtgaagagagttctttataaagcctgtaggttcttttaactttggtttaaaatgtaagataggaaaatgttggatatttgaggccatgcttaatatatttatattgcagtatcctttaaaagcaaaaaaaaaaaaatgcatttatattacagttttcctctatgaaagtccttacttatatgatacaagcactgtgttttgtgcttaaactcttcagcggggtagcatcaaagttcttggggaaggatcgtatatgtgggtcccttccctagaagaatggttgctgatatggctactgcttctacatcttgagttttttaatttactttttttacactgtagcattgagactgcttgattcaagtctggtgctttgccagatgtattaatttccataaatgctttgtgagtttggttaaaatgaagattcacttgggaaaacactgcagctttagtctgtgttactatcttgttatgagtatgtaaaagtaaaatgcatgtgaatttatcatatttgcactatgaaggtatttggttaaaatacaaagacttttaagattttaaggccctttcttccaacagcttttatagttagcagccattctttattttctggatagccaggttttatcacgcttctagtcaggatgctcctattccttctaaaaattacggtctgactagtgagcaaagtcttgaatttattcaaaagtcctaaataccttctctaggtaagacacttggtagatgagagacggaaggcattgtcaagaaccattttcatgagaggtggtgtgcaaaaaggtagaataaaagagttctttcaamaaagatttactgtctawtctgtactagaccctgtaggttttggggtacagtgttaaacatgatagaggctctgccgtcttggactttaatagcttagagaagagagcaaatgagctgacaggtggttataatgtgaattagtgctgtggtttaggaattggagagaactcaaaggagaggtatttggtgtaatggtaggctttctggagaaaatgatatttaagccaaganctcttagaagttagctaagagagagatgggaaaatgagacgacattgctggagtagataaaactgcatgttaaaggcaggaagatggggnaaaaaattccataaaactggaatggggaaatgt

SEQ ID NO: 69 - DNA, 603 bp, Homo sapiens
  misc_feature (584): n equals a,t,g, or c
  misc_feature (590): n equals a,t,g, or c
  misc_feature (595): n equals a,t,g, or c
tcgacccacgcgtccggcaccgggggaacaaggtcgtgaaaaaaaaggtcttggtgaggtgccgccatttcatctgtcctcattctctgcgcctttcgcagagcttccagcagcggtatgttgggccagagcatccggagttcacaacctctgtggtccgtagagccactatgaggagggccctgggaagaatttgccattttcagtgkgtaaggggcacggcttcgttgggggagggggcgcttggctgtgactcgcgcacctgcaaggccgcctccgggctgtggcgtgggagatgatagccagaaaccaggctgagacgcagactagcattccacttagcccaaggaccagtgaggaagctgggcatcctagcgcgtaccgctaaaggaatgggcaggtagatccggaagccctgcctccatcagccacctgacgccccctcccccgccccgcagaaagccctgagatggcyccgggaggccacggctgtaggtgtgttggttaaatccgagctggaggtcatcggacccgaaatgaaggtcattggaaaatcatgaggaaatcagggctctggttatggnacaggnttttnaaactagc

SEQ ID NO: 70 - DNA, 1101 bp, Homo sapiens
  misc_feature (195): n equals a,t,g, or c
  misc_feature (1080): n equals a,t,g, or c
  misc_feature (1081): n equals a,t,g, or c
  misc_feature (1090): n equals a,t,g, or c
aattcggcacgagcacagctcatgttttccagcctgtgtgggagcttggtctgaagagagattaagtgatagcctacttatggatcctggagaattcttcagaaatccatgtgtaactcaggtgcctatttggttatgacaaaagatatggctaatttttattttgaaaagtttgaataaacttagttttctctntttccacttgcaaagagttttgatgatggagactattttcctgtgtggggcacatgccttggatttgaagagctttcactgctgattagtggagagtgcttattaactgccacagatactgttgacgtggcaatgccgctgaacttcactggaggtcaattgcacagcagaatgttccagaattttcctactgagttgttgctgtcattagcagtagaacctctgactgccaatttccataagtggagcctctccgtgaagaattttacaatgaatgaaaagttaaagaagtttttcaatgtcttaactacaaatacagatggcaagattgagtttatttcaacaatggaaggatataagtatccagtatatggtgtccagtggcatccagagaaagcaccttatgagtggaagaatttggatggcatttcccatgcacctaatgctgtgaaaaccgcattttatttagcagagttttttgttaatgaagctcggaaaaacaaccatcattttaaatctgaatctgaagaggagaaagcattgatttatcagttcagtccaatttatactggaaatatttcttcatttcagcaatgttacatatttgattgaaagtcttcaatttgttaacagagcaaatttgaataattccatgattaaactgttagaataacttgctactcatggcaagattaggaagtcacagattcttttctataatgtgcctggctctgattcttcattctgtatgtgactatttatataacattagataattaaatagtgagacataaatagagtgtttttcatggaaaagccttcttatatctgaagattgaaaaaaataaatttactgaaatacaaaaaaaaaaaaaaaaaaaaatnnctcggtcgncaagggaattc

SEQ ID NO: 71 - DNA, 714 bp, Homo sapiens
ggcagagaaactgtggcgggatagttttcgggtccttgtccagtgaacaccctcggctgggaagtcagttcgttctctcctctcctctcttcttgtttgaacatggtgcggactaaagcagacagtgttccaggcacttacagaaaagtggtggctgctcgagcccccagaaaggtgcttggttcttccacctctgccactaattcgacatcagtttcatcgaggaaagagcatgtcctttgcaacctgatcacacaaatgatgaaaaagaatagaactttctcattcatctttgaataacgtctccttgtttaccctggtattctagaatgtaaatttacataaatgtgtttgttccaattagctttgttgaacaggcatttaattaaaaaatttaggtttaaatttagatgttcaaaagtagttgtgaaatttgagaatttgtaagactaattatggtaacttagcttagtattcaatataatgcattgtttggtttcttttaccaaattaagtgtctagttcttgctaaaatcaagtcattgcattgtgttctaattacaagtatgttgtatttgagatttgcttagattgttgtactgctgccatttttattggtgtttgattattggaatggtgccatattgtcactccttctacttgctttaaaaagcagagttagatttttgcacattaaaaaattcagtattaatt

SEQ ID NO: 72 - DNA, 2890 bp, Homo sapiens
  misc_feature (555): n equals a,t,g, or c
  misc_feature (2853): n equals a,t,g, or c
  misc_feature (2882): n equals a,t,g, or c
agggaattgagcacccggcagcggtctcaggccaagccccctgccagcatggccagcgagttcaagaagaagctcttctggagggcagtggtggccgagttcctggccacgaccctctttgtcttcatcagcatcggttctgccctgggcttcaaatacccggtggggaacaaccagacggcggtccaggacaacgtgaaggtgtcgctggccttcgggctgagcatcgccacgctggcgcagagtgtgggccacatcagcggcgcccacctcaacccggctgtcacactggggctgctgctcagctgccagatcagcatcttccgtgccctcatgtacatcatcgcccagtgcgtgggggccatcgtcgccaccgccatcctctcaggcatcamctcctccctgactgggaactcgcttggccgmaatgacctggctgawggtgtgaacttcgggccarggcctgggcatcgagatcatcgggaccctccagctggtgctatgcgtgctggctactaccgaccggaggcgccgtgamcttggtggctcagccgncccttgccatcggcctctctgtagcccttgggacacctcctggctattgactacactggctgtgggattaaccctgctcggtcctttggctccgcggtgatcacacacaacttcagcaaccactggattttctgggtggggccattcatcgggggagccctggctgtactcatctacgacttcatcctggccccacgcagcagtgacctcacagaccgcgtgaaggtgtggaccagcggccaggtggaggagtatgacctggatgccgacgacatcaactccagggtggagatgaagcccaaatagaaggggtctggcccgggcatccacgtakggggcaggggcagggcgggcggarggaggggagggtgaaatccatactgtagacactctgacaagctggccaaagtcacttccccaagatctgccagacctgcatggtcaagcctcttatgggggtgtttctatctctttctttctctttctgtttcctggcctcagagcttcctggggaccaagatttaccaattcacccactcccttgaagttgtggaggaggtgaaagaaagggacccacctgctagtcgcccctcagagcatgatgggaggtgtgccagaaagtcccccctcgccccaaagttgctcaccgactcacctgcgcaagtgcctgggattctaccgtaattgctttgtgcctttgggcacggccctccttcttttcctaacatgcaccttgctcccaatggtgcttggagggggaagagatcccaggaggtgcagtggagggggcaagctttgctccttcagttctgcttgctcccaagcccctgacccgctcggacttactgcctgaccttggaatcgtccctatatcagggcctsagtgacctccttctgcaaagtggcagggaccggcagagctctacaggcctgcagcccctaagtgcaaacacagcatgggtccagaagacgtggtctagaccagggctgctctttccacttgccctgtgttctttccccaggggcatgactgtcgccacacgcctctgtgtacatgtgtgcagagcagacaggctacaaagcagagatcgacagacagccaggtagttggaactttctgttccctatggagaggcttccctacacagggcctgctattgcagaatgaagccatttagagggtgaaggagaaatacccatgttacttctctgagttttagttggtctttccatctatcactgcattatcttgctcattcttcagttctctactccctcttgtcagtgtagacacaggtcaccattatgctggtgtatgtttatcaaagagcacttgagctgtctgaagcccaaagcctgaggacagaaagaccctgatgcaggtcagcccatggaggcagatgcccttgctgggcctgggggttttccaagccctcagctggtcctgaccaggatggagcaagctcttcccttgctcatgagctcctgatcagaggcatttgagcagctgaataacctgcacaggcttgctgtatgacccctggccacagccttccctctgcattgacctggaggggagaggtcagccttgacctaatgaggtagctatagttgcagcccaaggacagttcagagatcaggatcagctttgaaggctggattctatctacataagtcctttcaattccaccagggccagagcagctccaccactgtgcacttagccatgatggcaacagaaaccaagagacacaattacgcaggtatttagaagcagagggacaaccagaaggcccttaactatcaccagtgcatcacatctgcacactctcttctccattccctagcaggaacttctagctcatttaacagataaagaaactgaggcccacggtttcagctagacaatgatttggccaggcctagtaaccaaggccctgtctctggctactccctggaccacgaggctgattcctctcatttccagcttctcagtttctgcctgggcaatgccaggggccaggagtggggagagttgtgatggaggggagaggggtcacacccaccccctgcctggttctaggctgctgcacaccaaggccctgcatctgtctgctctgcatatatgtctctttggagttggaatttcattatatgttaagaaaataaaggaaaatgacttgtaaggtcaaaaaaaaaaaaaaaaaaaaaaaaaaaaaagggcggccgttctaggaggatccaagcttacgtacgggtgcatgggacgtcatagctcttctttaagtgtcacccaanttcaattcattgggcctcgtttttacaantcgtgact

SEQ ID NO: 73 - DNA, 2488 bp, Homo sapiens
  misc_feature (277): n equals a,t,g, or c
  misc_feature (446): n equals a,t,g, or c
  misc_feature (2382): n equals a,t,g, or c
  misc_feature (2412): n equals a,t,g, or c
ggcagagtgaccacgctccatactgggagaggcttctgggtcaaaggaccagtctgcagagggatcctgtggctggaagsgaggaggctccacacggccgttgcagctaccgcagccagtagagacagggtttcgccatcttggccaggctggtctcaaactcctgacctctggtgatccacccgcctcggcctcccaaagtgtagggattacaggtgtgagccaccgcacccggccagggcacccctctctctaacacaggatctgggcatccagncacggccatgacccctccaaggctcttctgggtgtggctgctggttgcaggaacccaaggcgtgaacgatggtgacatgcggctggccgatgggggcgccaccaaccagggccgcgtggagatcttctacagaggccagtggggcactgtgtgtgaacaacctgtgggnacctgactgatgccagcgtcgtctgccgggccctgggcttcgagaacgccacccaggctctgggcagagctgccttcgggcaaggatcaggccccatcatgctggacgaggtccagtgcacgggaaccgaggcctcactggccgactgcaagtccctgggctggctgaagagcaactgcaggcacgagagagacgctggtgtggtctgcaccaatgaaaccaggagcacccacaccctggacctctccagggagctctcggaggcccttggccagatctttgacagccagcggggctgcgacctgtccatcagcgtgaatgtgcagggcgaggacgccctgggcttctgtggccacacggtcatcctgactgccaacctggaggcccaggccctgtggaaggagccgggcagcaatgtcaccatgagtgtggatgctgagtgtgtgcccatggtcagggacttctcaggtacttctactcccgaaggattgacatcaccctgtcgtcagtcaagtgcttccacaagctggcctctgcctatggggccaggcagctgcagggctactgcgcaagcctctttgccatcctcctcccccaggacccctcgttccagatgcccctggacctgtatgcctatgcagtggccacaggggacgccctgctggagaagctctgcctacagttcctggcctggaacttcgaggccttgacgcaggccgaggcctggcccagtgtccccacagacctgctccaactgctgctgcccaggagcgacctggcggtgcccagcgagctggccctactgaaggccgtggacacctggagctggggggagcgtgcctcccatgaggaggtggagggcttggtggagaagatccgcttccccatgatgctccctgaggagctctttgagctgcagttcaacctgtccctgtactggagccacgaggccctgttccagaagaagactctgcaggccctggaattccacactgtgcccttccagttgctggcccggtacaaaggcctgaacctcaccgaggatacctacaagccccggatttacacctcgcccacctggagtgcctttgtgacagacagttcctggagtgcacggaagtcacaactggtctatcagtccagacgggggcctttggtcaaatattcttctgattacttccaagccccctctgactacagatactacccctaccagtccttccagactccacaacaccccagcttcctcttccaggacaagagggtgtcctggtccctggtctacctccccaccatccagagctgctggaactacggcttctcctgctcctcggacgagctccctgtcctgggcctcaccaagtctggcggctcagatcgcaccattgcctacgaaaacaaagccctgatgctctgcgaagggctcttcgtggcagacgtcaccgatttcgagggctggaaggctgcgattcccagtgccctggacaccaacagctcgaagagmacctcctccttcccctgcccggcaggcacttcaacggcttccgcacggtcatccgccccttctacctgaccaactcctcaggtgtggactagacggcgtggcccaagggtggtgagaaccggagaaccccaggacgccctcactgcaggctcccctcctcggcttccttcctctctgcaatgaccttcaacaaccggccaccagatgtcgccctactcacctgagcgctcagcttcaagaaattactggaaggcttccactagggtccaccaggagttctcccaccacctcaccagtttccaggtggtaagcaccaggacgccctcgaggttgctctgggatccccccacagcccctggtcagtctgcccttgtcactggtctgaggtcattaaaattacattgaggttcctaaaaaaaaaaaaaaaaaaanaaaaaaaaaaaaaaaagggsggccgctctngaggatccctcgaggggcccaagcttacgcgtgcatgcgacgtcatagctctctccctataatggaatcgtattat

SEQ ID NO: 74 - DNA, 711 bp, Homo sapiens
  misc_feature (696): n equals a,t,g, or c
ggcacgagccggagtggtcggtgggtgggatggaggcgaccttggagcagcacttggaagacactatctatgtaaaattcaaaactggaaaagtataaagggtacagagagacacctgcctcccaccgatgtccctcagcttccacttaccctccaggagaatgaagaatccctccattgttggagtcctgtgcacagattcacaaggacttaatctgggttgccgcgggaccctgtcagatgagcatgctggagtgatatctgttctagcccagcaagcagctaagctaacctctgaccccactgatattcctgtggtgtgtctagaatcagataatgggaacattatgatccagaaacacgatggcatcacggtggcagtgcacaaaatggcctcttgatgctcatatctgttcttcagcagcctgtcataggaactggatcctacctatgttaattaccttatagaactactaaagttccagtagttaggccattcatttaatgtgcattaggcacttttctgtttatttaagagtcaattgctttctaatgctctatggaccgactatcaagatattagtaagaaaggatcatgttttgaagcagcaggtccaggtcactttgtatatagaattttgctgtattcaataaatctgtttggaggaaaaaaaaaaaaaaaaaaattactgcggnccgacaagggaattc

SEQ ID NO: 75 - DNA, 906 bp, Homo sapiens
  misc_feature (1): n equals a,t,g, or c
  misc_feature (4): n equals a,t,g, or c
  misc_feature (362): n equals a,t,g, or c
  misc_feature (889): n equals a,t,g, or c
  misc_feature (894): n equals a,t,g, or c
  misc_feature (897): n equals a,t,g, or c
nctncccataaccatgttcccatgtgggtggtcgatggggctgcagaaggccgggaggagccgctggggcagcctggtgctccggcatagacgtgtgtgggtggtcaaggcaggtcactctgcccctctgagcctcagtcttctgccagtgacgcagggagacggcactgactgcctcccaggagcgtcggtggcctgcagaagatgcgcaggaagctgggmctcgtgcaggtggagctggaggaagacggggcgctggtgtccaagctcctggagaccatgcatctaaccggtgccgacttsacaaacaccttctacttgctgagctccttcccagtggagctagagtcgccaggcctggnsgaattcctggccaggctgatggagcagtgtgcctccctggaggagctgaggctggccttccggcccmagatggatccccggcagctatccatgatgctgatgctggcgcagtcaaacccgcagctgttcgcgcttatgggcacccgggcaggcatcgccagggagctggagcgtgtggagcagcagtctcggctggagcagctgagtgcggcagagctgcagagcaggaaccagggccactgggctgactggctacaggcgtacagagcccggctggacaaggacctggaaggcgctggggacgctgccgcctggcaggctkgagcacgtgcgcgtgatgcacgccaacaacccgaagtacgtgctgaggaactacattcgcgcagaatgccattcgaggttgccgagcgcggggatttttcagaggtgcggcgggtgttgaaattatttgagaccctttaccattgcgaggcgggggccgccacaagacggccgaggccacgggaagccgacgggggcggacggnaaggnagntttcttaca

SEQ ID NO: 76 - DNA, 271 bp, Homo sapiens
  misc_feature (36): n equals a,t,g, or c
gaacactctactttatgcaggaatagcagagatgantcatggttgggaagacactagaattcagccaggagaatatcattaaaagagggagaagggaaaacagactttttgtgtggtacaaaaacaaaaccctctgtatcattatgtgaacaacggtgcaaaaaagaggagacacagtttacccatgggtagctaactatgatagtgaaagttgccttgaaccttgttttagaaaaatggcaagtgtgggtctcactcttctagttcctga

SEQ ID NO: 77 - DNA, 673 bp, Homo sapiens
ttcggcacgagggtgaccagcggcgggtcacgtgacgcggtgcctggcgccgagcctcccaagatggcggtgtgcatcgcggtgattgccaaggagaattaccccctctacattcgcagcacccctacggagaacgagctgaagttccactacatggtgcacacatctctggacgtggtggatgagaagatctccgcaatggggaaggccctggtcgaccagagggagctgtacctgggcctgctctaccccacggaggactacaaggtatacggctacgtcaccaactccaaggtgaagtttgtcatggtggtagattcctccaacacagcccttcgagacaacgaaattcgcagcatgttccggaagctacacaactcctacacagacgtgatgtgcaaccccttctacaacccgggggaccgcatccagtccagggcctttgataacatggtgacgtcgatgatgatacaggtgtgctgagtgagctgtgctgccagccatcgcagaggagcccgcgcacgactgtggtggggccgtcggtctgttctggttgcctcttcctgaatgggacgcctggggctttcagggcaggcagctgtgcatgttctctcaactaaaggtcttgtgagaggaaaaaaaaaaaaaaaaaaaaaactcggggggggcccgg

SEQ ID NO: 78 - DNA, 367 bp, Homo sapiens
cttgctttctttcttacctctgaaggagaaaagaaagttgctacttacatgtttgaaaaacctctcaaatctactcagtcaaaagattttatgcttcaatttggtcatatgttaagagtttagcttctaaactgatacctcagtagcccatagtttaaaggagtaaagagtacatggatgcttttggtactactcagaagctctgagtttctgggccactgaaaccctgaaaagtagctaaatacgttcacttgctattttaatccatcactgtagatatgactcagtccctttgttattttcccccaatttgaaacaatttaatgtgctgaaaagataactttctccttttttctttctttttctc

SEQ ID NO: 79 - DNA, 1344 bp, Homo sapiens
  misc_feature (1319): n equals a,t,g, or c
gttctgaggagtttcccccttggcagccatgagccggcagttctggtagtgactgctgggccctgctggacagcggtcgcatgcagctcctatgaggcccctgccgccggtcggcgatgtccggctggagctgtcgcctccgccgccgctgctgccggtgccggttgtgagcgggtctccagtcggctcctctgggcgtctcatggcctctagcagctccctggtgcccgaccggctgcgcctgccgctctgcttcctgggtgtctttgtctgctatttttactatgggatcctgcaggaaaagataacaagaggaaagtatggggaaggagccaagcaggagacgttcacctttgccttaactttggtcttcattcaatgtgtgatcaatgctgtgtttgccaagatcttgatccagttttttgacactgccagggtggatcgtacccggagctggctctatgctgcctgttctatctcctatctgggtgccatggtctccagcaattcagcactacagtttgtcaactacccaactcaggtccttggtaaatcctgcaagccaatcccagtcatgctccttggggtgaccctcttgaagaagaagtacccgttggccaagtacctgtgtgtgctgttaattgtggctggagtggcccttttcatgtacaaacccaagaaagttgttgggatagaagaacacacagtcggctatggagagctactcttgctattatcgctgaccctggatggactgactggtgtttcccaggaccacatgcgggctcattaccaaacaggctccaaccacatgatgctgaacatcaacctttggtcgacattgctgctgggaatgggaatcctgttcactggggagctctgggagttcttgagctttgctgaaaggtaccctgccatcatctataacatcctgctctttgggctgaccagtgccctgggtcagagcttcatctttatgacggttgtgtattttggtcccctgacctgctccatcatcactacaactcgaaagttcttcacaattttggcctctgtgatcctcttcgccaatcccatcagccccatgcagtgggtgggcactgtgcttgtgttcctgggtcttggtcttgatgccaagtttgggaaaggagctaagaagacatcccactaggaagagagagactacctccacatcaagaatatttaagttattatctcaaacagtgacatctcttgggaaaatggacttaataggaatatgggactgagttccagtcttttttaataaaataaaatcaagcaaaaaaaaaaaaaaaaancccgagggggggcccggaacccaat

SEQ ID NO: 80 - DNA, 3748 bp, Homo sapiens
gccgatttgaaccgaggatttgggcggcaggaagagccgcggcgtaacggcagccatcttgtttgtttgagtgaatcggaaaggaggcgccggctgtggcggcggcgggagctgctcggaagctacacctcgcaagggctcccccctttccccaccccctcccccgacccttttcccctccccgggccacccagcccgcccaactcccagcggagagcaaggttttcttctgttttcatagccagccagaacaatgttctacgcacattttgttctcagtaaaagagggcctctggccaaaatttggctagcggcccattgggataagaagctaaccaaagcccatgtgttcgagtgtaatttagagagcagcgtggagagtatcatctcaccaaaggtgaaaatggcattacggacatcaggacatctcttactgggagtagttcgaatctatcacaggaaagccaaataccttcttgcagactgtaatgaagcattcattaagataaagatggcttttcggccaggtgtggttgacctgcctgaggaaaatcgggaagcagcttataatgccattactttacctgaagaatttcatgactttgatcagccactgcctgacttagatgacatcgatgtggcccagcagttcagcttgaatcagagtagagtggaagagataaccatgagagaagaagttgggaacatcagtattttacaagaaaatgattttggtgattttggaatggatgatcgtgagataatgagagaaggcagtgcttttgaggatgacgacatgttagtaagcactactacttctaacctcctattagagtctgaacagagcaccagcaatctgaatgagaaaattaaccatttagaatatgaagatcaatataaggatgataattttggagaaggaaatgatggtggaatattagatgacaaacttattagtaataatgatggcggtatctttgatgatccccctgccctctctgaggcaggggtgatgttgccagagcagcctgcacatgacgatatggatgaggatgataatgtatcaatgggtgggcctgatagtcctgattcagtggatcccgttgaaccaatgccaaccatgactgatcaaacaacacttgttccaaatgaggaagaagcatttgcattggagcctattgatataactgttaaagaaacaaaagccaagaggaagaggaagctaattgttgacagtgtcaaagagttggatagcaagacaattagagcccaacttagtgattattcagatattgttactactttggatctggcaccgccaccaagaaattgatgatgtggaaagagacaggaggagtagaaaaactgttttctttacctgctcagcctttgtggaataacagactactgaagctctttacacgctgtcttacaccgcttgtaccagaagaccttagaaaaaggaggaaaggaggagaggcagataatttggatgaattcctcaaagaatttgaaaatccagaggttcctagagaggaccagcaacagcagcatcagcagcgtgatgttatcgatgagcccattattgaagagccaagccgcctccaggagtcagtgatggaggccagcagaacaaacatagatgagtcagctatgcctccaccaccacctcagggagttaagcgaaaagctggacaaattgacccagagcctgtgatgcctcctcagcaggtagagcagatggaaataccacctgtagagcttcccccagaagaacctccaaatatctgtcagctaataccagagttagaacttctgccagaaaaagagaaggagaaagagaaggaaaaagaagatgatgaagaggaagaggatgaagatgcatcagggggcgatcaagatcaggaagaaagaagatggaacaaaaggactcagcagatgcttcatggtcttcagcgtgctcttgctaaaactggagctgaatctatcagtttgcttgagttatgtcgaaatacgaacagaaaacaagctgccgcaaagttctacagcttcttggttcttaaaaagcagcaagctattgagctgacacaggaagaaccgtacagtgacatcatcgcaacacctggaccaaggttccatattatataaggagctagaagcattatagctagtgtttgattcactagtgcttacaaattgcccccatgtgtaggggacacagaaccctttgagaaaacttagatttttgtctgtacaaagtctttgcctttttccttcttcatttttttccagtacattaaatttgtcaatttcatctttgagggaaactgattagatgggttgtgtttgtgttctgatggagaaaacagcaccccaaggactcagaagatgattttaacagttcagaacagatgtgtgcaatattggtgcatgtaataatgttgagtggcagtcaaaagtcatgatttttatcttagttcttcattactgcattgaaaaggaaaacctgtctgagaaaatgcctgacagtttaatttaaaactatggtgtaagtctttgacaagaaaaaaaaacaaacaaacacttctttccatcagtaacactggcaatcttcctgttaaccactctccttagggatggtatctgaaacaacaatggtcaccctcttgagattcgttttaagtgtaattccataatgagcagaggtgtacgcgaaattgtgttatgactgatagccttcagctacaaaaagataggactgacctggtttaaagtgttctattttgtaaatcattccatttgagtctttctgatgaacttggctatactgaaatctgttattttagtgaggctccaaaatgagcaaagctaggcctgattagagtagagtgactattaaaaaacataactttctaggagctataaatcaaagttttaaaaagatgtttggatatatttgagtattccgatcatgaaaacagaaattgccctgcctactacaaggacagactgatgggaaattatgcacctggtcaacttagcttttaagcagacgatgctgtaaaaactaacggcttctctgatatttattgtaagttttagtactgatctccttttccagtgctgcacactcctggtttggaactttaatagcgttgcaacgaaatcctatatccagtttcctgtaatttaattgaagaaaaatacatccaaataaagactttattattaacagaccagatagcatcagaaatcatgtgactgttatgattatcagaatatgtcttaactttttagggcaaagttaacactgaaagttctagcttaagtgttgaaacttttgtgggaaaaaaaaatcacttttgaaactcagacttcagtgtatacccaataatttaaaattatgtgaaatgttttaaatttgtgaactcgtaattactgttttaatgattcagtttcttcagagtggtaattgtataaaattgctattgcagctttatattcaatatgatgtgcctgtaaaccaaggagttttccccgtttgtaaaaagacattgtagataattgaatgtttgattttagaaaggtcattagtttcttgttacacattttgttagtctggtttttgttgcttatcgggtttaatattgttcttgaaaatagttgatgctatgttatgtataacttttctaataaaagttgtgttataagctgtaaaaaaaaaaaaaaaaaaaaaaaaaaaaaaacc

SEQ ID NO: 81 - DNA, 1891 bp, Homo sapiens
  misc_feature (1869): n equals a,t,g, or c
  misc_feature (1879): n equals a,t,g, or c
gttgctgtcatttgggcttactggcttggactgaaggtacgtagagaatacaggaaattcttcagagccaatgctggaaagaaaatctatgagtttacgcttcagagaattgtgcaaaaatacttcttggaaatgaaaaataagatgccttccttatctccaatagacaagaattggccctcaagaccttacttattcttggattctactcacaaggagctaaaaaggattttccacttgtggaggtgtaaaaaatacagggaccaattcacagaccagcagaaacttatttatgaagagaaactagaagccagtgaactcttcaaagacaagaaggctttatacccatctagtgttgggcaaccattccaaggggcttacctggaaatcaacaagaaccccaagtataagaaactcaaagatgccattgaagaaaagatcatcattgctgaagtcgtgaacaaaattaaccgtgctaatgggaagagtacatctcggattttcctcttaacaaacaataatctccttcttgctgaccaaaagtctggacaaatcaagtcagaggttccaytggtggatgtgaccaaggtatcaatgagctcacaaaatgatggcttcttcgccgtccacctcaaagagggctcagaagcagctagtaaaggagactttctcttcagcagtgatcacctgattgaaatggccaccaagctctatcgcacaactctcagccaaaccaaacagaagctcaatattgagatttccgatgagttcctggtacagttcagacaggacaaagtatgtgtgaagtttattcagggaaaccagaaaaatgggagtgtcccaacatgtaaacgaaaaaacaaccgtctccttgaagttgctgtcccttaactggcgcctcctctctactttcatggacttgttcctttgtaatagtgcaatttggttttgttttatttggggttcattgtatgtttgggaatcaccaaaggcttttagagttctttggcaaaataaaaatatttgactaatcaatttttattattggaatagttttaacctttcaaatacatgttctgtcctggagcaggattgtagaaactaacagtgtctattttcatgtctgatgtgttcttcctttagtcatcatgttaggtctgtgtaccctaaatcagcatattactcataaatcattaattaatataagcataggaaatggtcttaaaagatactgcattcattcatcagatatttattccatgcctactctatgctaggcactgtgctagatggtatgaaaacttattaggaacctttttgtttttgagaccattgcattctggctggtttgtgctggtttaacgacatctaagaaggtttagaaatggtgagaccaaaacaataactgttaatgatggacagcattattaggaaccctgtagtatgatatttaacaatataggcttcaagaagggctggtcctaagagggggcagaaatgaatgaccaggttaaatccctctacatgtggtttctgtttgaaaaaaagaaaactgacatttgaacaggacttttaatttgtttaaaactctggtaattacttgtaacagtagaaaatagaagtcattcttattttagaaaaagtgacagaagcagtccagtaagattatatgtttctgtttctggtaaataccatatatgatcctcgaaatgataatatctccagaatattgttttcacccaaatttgagtagatattttaaacacctaacaaagtaaagggctaaaagccattcagatagcagtaaaacattctgtatgatgtgcaataaaacatccaagatcttttttgaaagtgwkatttccgttnaagtcccccnttaggacccccg

SEQ ID NO: 82 - DNA, 1954 bp, Homo sapiens
ttcagtgtctggcacactgagacacctccaagaaggagattgatgcatcaggttcagtttaacctggaatatctgactacccctgaatccacccagaaagggggcccaacacccttgtccatttatgggtattttttttcgaagttattaagcatattccttttccacgaacctcttctgtactttgattgtaataggttggctcttacacccattccaaatgcagtttatttttagacccgattgcaaatagtgatgtagttttaaccagtatggattagttcagggatgaactgctccctccagccttactggctctgatccacagggttttgttttgttttgttttgttttttgtttaagtcgagatataaaaactgaacacgataacacttactcttaaatcaagcatcaacactttttccctgttagaattctttgcatttttgtgtttgtaacagaaacgccttaagacactatgtttgggaatataggaaactatgtgtgtcccaaggaaatccctgtaaatttaactcacctacaaaaggctttttccccgcctttggttgttaacggcattcctgaaagccacatgtgtttattcattgggcttgttcttatcagcaaataggttttctggttttatgactttttgtcttattttatktttcctacatttctttttttttttttttccyttagaatgccckggraatatatttaagtggkaatgraaaatagtaatcatagtaaaacgcaacargargraaaccmacccaaaccagtgaagttttttagaacctttagaagggtggtctttattcaggttttactgtaatggtaaggattgactcaagagacagtattagtaaatttattgtgtatggatcaaaagtgaataatgtatgaatgagagctgtaagaaggatttttattttgttataatttagttaccattttcagtgttatttcaaaggttctttgaagaattttggggcagggcatcagattagagttttaaaatttgagtattttggatatcagtgttcctcatgaagatatacatggatattcaattttgatggcttccagatttgtaagattktatgttgtatataccattctattaagaaacatgtccactgtgctttcaaacatagataaagcatgataaagattattatttaagatatacttgtatttatacctcagatattcttttgggttttgtacctcaaggcttttttcttcttattgtaaatacactttacgtgaatacagtctaagtgaagaaaataaataaaaggaagaggtttataacttgctctatatctgtacagattataatcaataagtgcactattattaaatgtttaaagtaagggaaaagtctgggctgccttccttaatattgcatctcactcccacccttaaaaccacagattgcaaagcatagcattttagcatcaactacaatcaaaagagcgatttgctgaaggaaaaatcggactgcaaatcattccaaggccaaactgcaactgagccacccactcccaaacaggaaaccctggtgaaggttcaggaagcacggagattctctccaacaaaggtccagttaggaaacgacgctgagaggatgacgacaacgtgcaacagcagaaagatgcttgcaagcagagtcagggtcaccagtgaatgccacaaaagttctctttcccactgtttaatttgacaagagaagaatttgaaggatatgaacattttcaagaactctgctgaggtcacttagagcgccatcacaacttatttgtgtgactaattgcctagattgtaagctctttgagggcagggcttgtctcttacacatctttataatcccctgcagcggctttcagtattttgtacttgtaggcacctaataaatttattatttgctatactgaaaaaaaaaaaa

SEQ ID NO: 83 - DNA, 936 bp, Homo sapiens
  misc_feature (895): n equals a,t,g, or c
  misc_feature (930): n equals a,t,g, or c
  misc_feature (936): n equals a,t,g, or c
aattcggcacgagctggaggcagagcagtcctctctggggagcctgaagcaaacatggatcaagaaactgtaggcaatgttgtcctgttggccatcgtcaccctcatcagcgtggtccagaatggattctttgcccataaagtggagcacgaaagcaggacccagaatgggaggagcttccagaggaccggaacacttgcctttgagcgggtctacactgccaaccagaactgtgtagatgcgtaccccactttcctcgctgtgctctggtctgcggggctactttgcagccaagttcctgctgcgtttgctggactgatgtacttgtttgtgaggcaaaagtactttgtcggttacctaggagagagaacgcagagcacccctggctacatatttggggaaacgcatcatactcttcctgttcctcatgtccgttgctggcatattcaactattacctcatcttctttttcggaagtgactttgaaaactacataaagacgatctccaccaccatctcccctctacttctcattccctaactctctgctgaatatggggttggtgttctcatctaatcaatacctacaagtcatcataattcagctcttgagagcattctgctcttctttagatggctgtaaatctattggccatctgggcttcacagcttgagttaaccttgcttttccgggaacaaaatgatgtcatgtcagctccgccccttgaacatgaccgtggccccaaatttgctattcccatgcattttgtttgtttcttcacttatcctgttctctgaagatgttttgtgaccaggtttgtgttttcttaaaataaaatgcagagacatgttttaagctgaaaaaaaaaaaaaaaaaacccggggggggcccggnaccaattcgcccaaaagggggcgattaaaatcccnggccgn

SEQ ID NO: 84 - DNA, 1513 bp, Homo sapiens
tctaaactagtggatccccgggctgcaggaattcggcacaggctctcagaggctaagaaggtggagaccggagaagctgtgaggttctttagcgtcacctccctcactgggcagcatgggggagaagtcagagaactgtggggttccagaggatctgttaaatggtttgaaggttacagatactcaggaagccgagtgtgctggccctccagttcctgatcccaaaaatcagcattcccagagtaagctgctcagggatgatgaggcccatctccaggaggaccagggagaagaggagtgttttcatgactgcagtgcctcatttgaggaggagccaggagcggacaaggttgagaacaaatctaatgaagatgtgaattcctctgaactagatgaagaatacctaatagaactggaaaaaaacatgtcggatgaagagaaacagaaaagaagagaagagagcactagactaaaggaggagggaaatgaacagtttaagaaaggagattatatagaagctgaaagttcttatagtcgagccctcgaaatgtgcccatcctgcttccaaaaggagaggtcgattctattttcaaatagagctgcagcaaggatgaaacaggacaagaaagaaatggccatcaatgactgcagcaaagcaattcaattaaaccccagctatatcagggcaatattgaggagagcagagttgtatgagaagacggacaagctagatgaagccctggaagactataaatctatattagaaaaagatccatcaatacatcaagcaagagaagcttgtatgagattacctaagcaaattgaagaacgtaatgaaagactaaaagaagagatgttaggtaaattaaaagatcttgggaacttggttctccgaccttttgggctctccacggaaaatttccagatcaaacaggattcctctaccggctcgtactccatcaatttcgttcaaaatccaaataataacagataacaaagataacaaaagctttacaagctgacttggaattgtgtgctgcttgctgttagctaggggaaaggccctgccaatgtttaacttttaaaagcatcttatctaaaagaaaggctatccagtagagcccagtgctcccttgtccctcttttatgatcagggtgaaatgtacttcctgatgtaatgaacctaatttgatttccattttaaggtggtgtctgtgcagctggtgtccccgattctggctgtcctatgtccaggaagaagcccatttgttgaggctgaccttcctgatcatacacacacacagcccagcaaaagcctctcctgaaccaaacaaacctgttggttgggagactgcccagacatgattgatgacgggttcccgcctgctgtcccctccctgatcacacagctaacgaggctgcctccagcatttcctgatttcctctgtggtaataaaagctttctgtgcttaaaaaaaaaaaaaaaaaaaaaacttcgaggggggggcccggt

SEQ ID NO: 85 - DNA, 1298 bp, Homo sapiens
  misc_feature (3): n equals a,t,g, or c
gtngggcggctgctgctccgggcctgggcacagcaagcggcgacgtcaagctcccggggttggcgcggttggcgggggcagtcccgagcgtgaggaggtcggcgcaggctacaacagtgaggacgagtatgaggcggctgcagcacgcatcgaggctatggaccctgccactgtcgagcagcaggagcattggtttgaaaaggccctacgagacaagaagggcttcatcatcaagcagatgaaggaggatggcgcctgtctcttccgggctgtagctgaccaggtgtatggagaccaggacatgcatgaggttgtgcgaaagcattgcatggactatctgatgaagaatgccgactacttctccaactatgtcacagaggactttaccacctacattaacaggaagcggaaaaacaattgccatggcaaccacattgagatgcaggccatggcagagatgtacaaccgtcctgtggaggtgtaccagtacagcacagaacccatcaacacattccatgggatacatcaaaacgaggacgaacccattcgtgttagctaccatcggaatatccactataattcagtggtgaatcctaacaaggccaccattggtgtggggctgggcctgccatcattcaaaccagggtttgcagagcagtctctgatgaagaatgccataaaaacatcggaggagtcatggattgaacagcagatgctagaagacaagaaacgggccacagactgggaggccacaaatgaagccatcgaggagcaggtggctcgggaatcctacctgcagtggttgcgggatcaggagaaacaggctcgccaggtccgaggccccagccagccccggaaagccagcgccacatgcagttcggccacagcagcagcctccagtggcctggaggagtggactagccggtccccgcggcaggagtttcagcctcgtcacctgagcaccctgagctgcatgctgaattgggcatgaagcccccttccccaggcactgttttagctcttgccaaacctccttcgccctgtgcgccaggttacaagcagtcagttctcggcaggggccgaccgggcaacttccccccttgtgtccctctaccctgctttggagtkccgggccctcattcagcagatgtccccctctgcctttggtctgaatgactgggatgatgatgagatcctagcttcggtgctggcagtgtcccaacaggaatacctagacagtatgaagaaaaacaaagtgcacagagacccgcccccagacaagagttgatggagaccca

SEQ ID NO: 86 - DNA, 2009 bp, Homo sapiens
  misc_feature (1955): n equals a,t,g, or c
  misc_feature (1959): n equals a,t,g, or c
  misc_feature (2008): n equals a,t,g, or c
gtgttcgtccgcttgtcactgaattggaccctgatgctcccataagacagaaaatgccccttgatgatctggatagagaagatgaagttagattactcaaatatctctttactctaatccgtgctggaatgacagaagaggcacaacgactctgtaaacgctgtggtcaagcatggagagctgcaacacttgaaggctggaaactgtaccatgaccctaatgttaatggaggaacagaattagaacctgttgaagggaatccatatagacgcatttggaaaataagttgctggagaatggcagaagatgagctttttaatagatacgagagagcaatttatgcagctttaagtgggaatcttaagcagctgcttcctgtctgtgacacctgggaagacacagtttgggcctacttccgggtgatggtggacagtctggtagaacaggagatccagacatcagtagcaactctggatgaaactgaagaactccctagagaatatctgggagcaaactggacgttagaaaaggtttttgaggaacttcaagctactgacaaaaagagagttctggaaagagaatcaagaacattatcatatagttcaaaagtttcttatcctgggagacattgatggtttgatggatgagtttagcaaatggctttccaaaagcagaaacaatctacctggacacctgcttcgctttatgactcaccttattttgtttttccgtactctgggactacagaccaaggaggaagtttctattgaagttttaaagacatacatacagcttttaataagagagaaacatacaaatcttatagcattttatacctgtcatttgcctcaagacctagctgttgcccagtatgcattatttttggaaagtgttacagaatttgaacagcgccaccattgcctggagttggctaaagaagcagatttggatgttgcaacaataacaaaaactgtagttgagaatattcgaaagaaagataatggtgaatttagtcatcatgacctggccccagccctagatactggcactactgaggaggatcgtttaaaaattgatgtaattgactggttggtatttgacccagcgcagagggcagaagcactgaaacaaggcaatgcaattatgagaaaaytcttggcatcaaaaaagcacgragctgcaaaagaagtatttgtgaaaattcctcaggattctatagcagaaatctataatcagtgcgaggaacaaggaatggaaagtccacttcctgctgaagatgataatgctatccgagaacatttgtgcatcaragcttatttggaagcccatgaaacctttaatgagtggtttaagcatatgaattcagttccacaaaaacctgctttgatacctcaaccaacttttactgagaaagtggctcatgaacacaaagaaaagaaatatgaaatggattttggtatttggaaagggcatttggatgccctaactgctgatgtgaaggagaaaatgtataacgtcttgttgtttgttgatggagggtggatggtggatgttagagaggatgccaaagaagaccatgaaagaacacatcaaatggtcttactgagaaagctttgtctgccaatgttgtgttttctgcttcatacgatattgcacagtactggtcagtatcaggaatgcctacagttagcagatatggtatcctctgagcgccacaaactgtacctggtattttctaaggaagagctaaggaagttgctgcagaagctcagagagtcctctctaatgctcctagaccagggacttgacccattagggtatgaaattcagttatagtttaatcttcgtaatctcactaattttcatgataaatgaagtttttaataaaatatacttgttattagtaaaaaaaaaaaaaaaagggcggccgctctagaggatccctcgaggggccncaanttacgcgtgcatgcgacgtcatagctctctccctatagtgagtcgtacng

SEQ ID NO: 87 - DNA, 534 bp, Homo sapiens
  misc_feature (466): n equals a,t,g, or c
  misc_feature (477): n equals a,t,g, or c
  misc_feature (526): n equals a,t,g, or c
ggacgccgacgtgcagttcctggcctcggtgctgcccccagacacggatcctgcgttcttcgagcaccttcgggccctcgactgctccgaggtgacggtgcgagccctgcccgagggctccctcgccttccccggagtgccgctcctgcaggtgtccgggccgctcctggtggtgcagctgctggagacaccgctgctctgcctggtcagctacgccagcctggtggccaccaacgcagcgcggcttcgcttgatcgcagggccagagaagcggctgctagagatgggcctgaggcgggctcagggccccgatgggggcctgacagcctccacctacagctacctgggcggcttcgacagcagcagcaacgtgctagcgggccagctgcgaggtgtgccggtggccgggaccctggcccactccttcgtcacttccttttcaggcagcgaggtgcccctgacccgntgttggggcanaagtttgtgaagggccttgggttgacctgggggcaaagccaagttttgnttgagcaa

SEQ ID NO: 88 - DNA, 4302 bp, Homo sapiens
  misc_feature (1015): n equals a,t,g, or c
  misc_feature (4270): n equals a,t,g, or c
  misc_feature (4274): n equals a,t,g, or c
  misc_feature (4296): n equals a,t,g, or c
gtcagtaaccagcacaacattaatagaaattttaagtgacactggagcagaaggacccacggtggcacctctccctttctccacggacatcggacatcctcaaaatcagactgtcaggtgggcagaagaaatccagactagtagaccacaaaccataactgaacaagactctaacaagaattcttcaacagcagaaattaacgaaacaacaacctcatctactgattttctggctagagcttatggttttgaaatggccaaagaatttgttacatcagcaccaaaaccatctgacttgtattatgaaccttctggagaaggatctggagaagtggatattgttgattcatttcacacttctgcaactactcaggcaaccagacaagaaagcagcaccacatttgtttctgatgggtccctggaaaaacatcctgaggtgccaagcgctaaagctgttactgctgatggattcccaacagtttcagtgatgctgcctcttcattcagagcagaacaaaagctcccctgatccaactagcacactgtcaaatacagtgtcatatgagaggtccacagacggtagtttccaagaccgtttcagggaattcgaggattccaccttaaaacctaacagaaaaaaacccactgaaaatattatcatagacctggacaaagaggacaaggatttaatattgacaattacagagagtaccatccttgaaattctacctgagctgacatcggataaaaatactatcatagatattgatcatactaaacctgtgtatgaagacattcttggaatgcaaacagatatagatacagaggtaccatcagaaccacatgacagtaatgatgaaagtaatgatgacagcactcaagttcaagagatctatgaggcagctgtcaacctttctttaactgaggaaacatttgagggctctgctgatgttctggctagctacactcaggcaacacatgatgaatcaatgacttatgaagatagaagccaactnagatcacatgggctttcacttcacaactgggrtccctgctcctagcacagaaacagaattagacgttttacttcccacggcaacatccctgccaattcctcgtaagtctgccacagttattccagagattgaaggaataaaagctgaagcaaaagccctggatgacatgtttgaatcaagcactttgtctgatggtcaagctattgcagaccaaagtgaaataataccaacattgggccaatttgaaaggactcaggaggagtatgaagacaaaaaacatgctggtccttcttttcagccagaattctcttcaggagctgaggaggcattagtagaccatactccctatctaagtattgctactacccaccttatggatcagagtgtaacagaggtgcctgatgtgatggaaggatccaatcccccatattacactgatacaacattagcagtttcaacatttgcgaagttgtcttctcagacaccatcatctcccctcactatctactcaggcagtgaagcctctggacacacagagatcccccagcccagtgctctgccaggaatagacgtcggctcatctgtaatgtccccacaggattcttttaaggaaattcatgtaaatattgaagcgactttcaaaccatcaagtgaggaataccttcacataactgagcctccctctttatctcctgacacaaaattagaaccttcagaagatgatggtaaacctgagttattagaagaaatggaagcttctcccacagaacttattgctgtggaaggaactgagattctccaagatttccaaaacaaaacckatggtcaagtttctggagaagcaatcaagatgtttcccaccattaaaacacctgaggctggaactgttattacaactgccgatgaaattgaattagaaggtgctacacagtggccacactctacttctgcttctgccacctatggggtcgaggcaggtgtggtgccttggctaagtccacagacttctgagaggcccacgctttcttcttctccagaaataaaccctgaaactcaagcagctttaatcagagggcaggattccacgatagcagcatcagaacagcaagtggcagcgagaattcttgattccaatgatcaggcaacagtaaaccctgtggaatttaatactgaggttgcaacaccaccattttcccttctggagacttctaatgaaacagatttcctgattggcattaatgaagagtcagtggaaggcacggcaatctatttaccaggacctgatcgctgcaaaatgaacccgtgccttaacggaggcacctgttatcctactgaaacttcctacgtatgcacctgtgtgccaggatacagcggagaccagtgtgaacttgattttgatgaatgtcactctaatccctgtcgtaatggagccacttgtgttgatggttttaacacattcaggtgcctctgccttccaagttatgttggtgcactttgtgagcaagataccgagacatgtgactatggctggcacaaattccaagggcagtgctacaaatactttgcccatcgacgcacatgggatgcagctgaacgggaatgccgtctgcagggtgcccatctcacaagcatcctgtctcacgaagaacaaatgtttgttaatcgtgtgggccatgattatcagtggataggcctcaatgacaagatgtttgagcatgacttccgttggactgatggcagcacactgcaatacgagaattggagacccaaccagccagacagcttcttttctgctggagaagactgtgttgtaatcatttggcatgagaatggccagtggaatgatgttccctgcaattaccatctcacctatacgtgcaagaaaggaacagttgcttgcggccagccccctgttgtagaaaatgccaagacctttggaaagatgaaacctcgttatgaaatcaactccctgattagataccactgcaaagatggtttcattcaacgtcaccttccaactatccggtgcttaggaaatggaagatgggctatacctaaaattacctgcatgaacccatctgcataccaaaggacttattctatgaaatactttaaaaattcctcatcagcaaaggacaattcaataaatacatccaaacatgatcatcgttggagccggaggtggcaggagtcgaggcgctgatccctaaaatggcgaacatgtgttttcatcatttcagccaaagtcctaacttcctgtgcctttcctatcacctcgagaagtaattatcagttggtttggatttttggaccaccgttcagtcattttgggttgccgtgctcccaaaacattttaaatgaaagtattggcattcaaaaagacagcagacaaaatgaaagaaaatgagagcagaaagtaagcatttccagcctatctaatttctttagttttctatttgcctccagtgcagtccatttcctaatgtataccagcctactgtactatttaaaatgctcaatttcagcaccgatggccatgtaaataagatgatttaatgttgattttaatcctgtatataaaataaaaagtcacaatgagtttgggcatatttaatgatgattatggagccttagaggtctttaatcattggttcggctgcttttatgtagtttaggctggaaatggtttcacttgctctttgactgtcagcaagactgaagatggcttttcctggacagctagaaaacacaaaatcttgtaggtcattgcacctatctcagccataggtgcagtttgcttctacatgatgctaaaggctgcgaatgggatcctgatggaactaaggactccaatgtcgaactcttctttgctgcattcctttttcttcacttacaagaaaggcctgaatggaggacttttctgtaaccaggaacattttttaggggtcaaagtgctaataattaactcaaccaggtctactttttaatggctttcataacactaactcataaggttaccgatcaatgcatttcatacggatatagacctagggctctggagggtgggggattgttaaaacacatgcaaaaaaaaaaaaaaaaaagaaattttgtatatataaccattttaatcttttataaagttttgaatgttcatgtatgaatgctgcagctgtgaagcatacataaataaatgaagtaagccataaaaaaaaaaaaaaaaaaaaaaaaaaaaaaaaaaaaaaaaaaaaaaanaaanaaaaaaaaaaaaaaaaaaaaangggggg

SEQ ID NO: 89 - DNA, 2782 bp, Homo sapiens
  misc_feature (82): n equals a,t,g, or c
  misc_feature (743): n equals a,t,g, or c
ggaaaagcaggagaccagttggtgccagataatctaaaagaaacagataaggaaaagggcaatgtggtgctgaaaggagaantgagtgcccggatgaagattccaagcaatatgtgggtagaagcctgggaaacagctaagccaattcctgctagaaggcaaaggagactctttgatgatacacgggaagcagaaaaggtgctgcactatctggcaatccagaaacctgcagaccttgctcggcacctgttaccttgtgtgattcatgcagctgtactcaaggtaaaggaagaagaaagtctcgaaaacatttcttcagttaagaagatcataaagcagataatatcccattccagtaaagttttgcacttccccaatccagaagacaagaaattggaagaaatcattcaccagattactaatgtggaagctctcattgccagagctcggtcactaaaagccaagtttggaactgagaaatgtgaacaggaggaggaaaaggaagatcttgaaaggtttgtgagttgcctgctggagcagcctgaagtgttagtcaccggtgcaggaagaggacatgctggcaggatcattcacaagctgtttgtgaatgcccagaggtgccagctatgactccaccagaggaggaattgaagagaatgggctccccagaggaaagaaggcagaactccgtgtcagacttcccaccccctgctggccgggaattcattttgsgcamcactgtncgcgccctgctccctactccaaagctctgcctcagcggatgtacagtgttctcaccaaagaggactttagacttgcaggtgccttttcatcagatacttccttcttctgattcttctagcattactcgttggtggcttcagagacagtgctgcctcctcctgagggagggaaggtaccagggagaacctgggaggtcctggagagggccctgtccagttgggtgatcaggaatcaaaccagcatcggaaagacttcccagcaccaagcttgagctgtgtcgtttcgtggagggggcagcgaggatgggcttgagctgttgagagatttctgccctagagatggcctttgtatatgggggggtggtggggggacacaaacacatcagacactccgtcctcacactggcaggacggtgttcatcgcattctcttctgtgaccagcctctaggctagcggctgcattcgtggtctgtgcaaacacttcgtggttctatatatcagcagcaagtgtgcaaaataaaggacctgttaactcagatttctggatattttggtggtagcttctagtcccagaatctgtgtttttaaaatactacatgacattctgtctattcaatcacctggtggtcatctttcttgtactaattaactgttgatgagcattttggatattctaggagaaagcctataatttcacatagtttctctttttcatgtaactgtaacctaaatgtattacttctgataaaactatatatcaaatgtcactgcaaattagttttatatctgtcatgtgagatttgtcttacttatttttcttttggttgccatggaagttatggccctgaaaatcgtctccctccccttctcttgctgtacagcatgcgttctctttttgtggttgctggctgggtactgtatttaatgaagtagagaatagcacttgcaaaaatacagtcttggtacctagagactgtcatgcagatagtataatttggtatatgtgctaatgcattgagtagaggattattttaacacactattttgcttttgtattttagttaaaataatcgatggggatgtgtagcccccccgtgtgaggatgacatcaccacatttctagtttcatggagctcaagatgtcttgtgtctgtgtggctagatggcctctgcttggtaatcttatttttaggcctaaaattcccacttaaatccaaagtaaaaatggttatactgaagcataaaccttgcctgtgtaattttaaaaaattaatagagctgtgcaaaccctgttatttttgtaaaaaaaaaaaaaaatacatatctatatataatatgtgtgtgtgtgtgacatatgcacacgtctctgtgtatgtgaagtaggggaggccctgggggatgacctcccagcctttatgatgcttttctctatgctgctggacttcattcttactggtccacgcagatgcaggcgcctgaggccagtgctgtaccaagtagaagacggttcctaaggacagagtttgtctgttttctaacaaagaaaaattctacaaaggagaggttgggcgttacaaaggcattgtgaatctaataaaaggaaagtgtcgctttctgtggcgttttctttcattttctcccgctgrggcwtttcagtctaatttcatgtggktttgtgctgtctcagctctaatgtttgcagcctgctgagcctaacaaggcagtggtctcaagaacattctttgtgcctttttaaagtactccattttatttttatgatagttatgtatttatttcacagatatatttaagtacccactttgtgtcaggtacagtacaagcaatgaagataaaacagaaaccaaaacacactcccttacagggaaaactgacaccacgttgccacaaaatgttgagtatagtcaactctgctgtgtggatcggagggcctgcatttatcctacaaataattgaatgtaatcctacattcatgtattcattggcagtacggagtaataaatgcagcaatgccataaaa

SEQ ID NO: 90 - DNA, 1037 bp, Homo sapiens
aattcggcacgagctgtctgcgaagtggcccttgattacaaaaagaagaaacacacctaaacactttatctccaagttacaaaagtttgaggtgcagagggaaggccagattttttttttaatgaaattatatagattagatctcagtatttaaactgttcctcaattttgtgaggctgtgttggaaataacccgcctctagtgctgttggtatgcaaggcagcggtgcttaatcaatatttcctgtgctcaccagaggcaaaatgtaccaatatcctgacaccattctctctccatttacttctggtggttaccctgactcttgactcttagaagtgcccgagatggggctaacctttattaaacagatcgcatattatgatcttgctgcagccacagtgcagctccacattaactctacagaccaaaccatttgtatctggcatcacttactaacacacgacatgcggcttttctgcatcaactgctatgacggttaagaatgtcagtatacaagaaggaatagaaaactgatactgttttaaataatctgtaatttcaatttttttttttttttgctgaaatacattatattgtacgtttgagataattctagtacaaagtataataaaactagatgtataataaaccctttaaatcattggtaagtgtacaagtggtggaactgaagcatttactggacaaagtaatgttactctaatggttacttgctcgtgcgttgccacactgtgttataatttgcttcatttccttgctatttgatacatagtgtgcatttctctgtcactgtaactattgtaatgacaaattttcatcttactgcacaatcaaaatgacattgataggaatgaactccagaggctgggcctgaacagggaggtggtcgctcaggcctggtgctcagtcgtacgacctgtacctctcaacttttgccctatctgttaaatatatgctatgtcattaaatgcttttaaatctaaaaaaaaaaaaaaaaaaaaaaacgggggggggcccgg

SEQ ID NO: 91 - DNA, 1052 bp, Homo sapiens
  misc_feature (76): n equals a,t,g, or c
  misc_feature (962): n equals a,t,g, or c
  misc_feature (965): n equals a,t,g, or c
  misc_feature (1044): n equals a,t,g, or c
  misc_feature (1048): n equals a,t,g, or c
gggcacgagtgcaggtggatgctgcactgcacccagcatctctgcttatcaggaggctctggagccacaccgcagnaagcacacgcccttttgagccagacatgctgactttctaataaggatgttctctctccacagctgaaagatgaaaattctaagctgagaagaaagctgaatgaggttcaragcttctytraagcwcawacagaaatggtgaggacgcttgagcggaagttagaagcaaaaatgaatcaaggaggaaagcgactaccacgacctggagtcggtggttcagcaggtggagcagaacctggagctgatgaccaaacgggctgtaaaggcagaaaaccacgtcgtgaaactaaaacaggaaatcagtttgctccaggcgcaggtctccaacttccagcgagagaatgaagccctgcggtgcggccagggtgccagcctgaccgtggtgaagcagaacgccgacgtggccctgcagaacctccgggtggtcatgaacagtgcacaggcttccatcaagcaactggtttccggagctgagacactgaatcttgttgccgaaatccttaaatctatagacagaatttctgaagttaaagacgaggaggaagactcttgaggacccctgggtgttctcagcatgaagctccgtgtataccctgaggtcaccaccgctcgatctaaatgtgcagttgtgtccttaaatatgcagtcttcacccagagtaaagtgttgatcgcaagagtccagtgtcgtgccctcagccagttcttggccaccacaatgggagcagccctggcccgagttgtctctgtggtttctatgcagcccttcttggsgaaattcctgcgatcttatagattctaatgagctcttggaagacattgtcataaaagccagtgattttaaraaaaaaaaaaaaaaaagggcgggccggttttaaaagatccctnganggggcccaagcttacgcgtgcattcgacgtcataacttttttccctataagggagcgattataagcttaggcacttggnccgnggtt

SEQ ID NO: 92 - DNA, 1234 bp, Homo sapiens
  misc_feature (1115): n equals a,t,g, or c
cttcggcgcatgcgcgctgaggcctgcctgaccgaccttcagcagggctgtggctaccatgttctctcgcgcgggtgtcgctgggctgtcggcctggaccttgcagccgcaatggattcaagttcgaaatatggcaactttgaaagatatcaccaggagactaaagtccatcaaaaacatccagaaaattaccaagtctatgaaaatggtagcggcagcaaaatatgcccgagctgagagagagctgaaaccagctcgaatatatggattgggatctttagctctgtatgaaaaagctgatatcaaggggcctgaagacaagaagaaacacctccttattggtgtgtcctcagatcgaggactgtgtggtgctattcattcctccattgctaaacagatgaaaagcgaggttgctacactaacagcagctgggaaagaagttatgcttgttggaattggtgacaaaatcagaggcatactttataggactcattctgaccagtttctggtggcattcaaagaagtgggaagaaagccccccacttttggagatgcgtcagtcattgcccttgaattactaaattctggatatgaatttgatgaaggctccatcatctttaataaattcaggtctgtcatctcctataagacagaagaaaagcccatcttttcccttaataccgttgcaagtgctgacagcatgagtatctatgacgatattgatgctgacgtgctgcaaaattaccaagaatacaatctggccaacatcatctactactctctgaaggagtccaccactagtgagcagagtgccaggatgacagccatggacaatgccagcaagaatgcttctgagatgattgacaaattgacattgacattcaaccgtacccgccaagctgtcatcacaaaagagttgattgaaattatctctggtgctgcagctctgtaaagaaggaaaattcagccagttgattttgtttttagcttactgctgcctttgtccgaagaaactgttcctccattatttgaattactgaagacagcaagatatttgtaaattatcttaaaataaacaacttaaaataaaatcattgtttttcttatatataagnacaatagatatagtttttgaaatgagatgatactaaaacatttaaaaatattaatatgctactattaaaattttttagtagaagacaaaaaaaaaaaaaaaaaaaaaaaaaaaaaaaaa

SEQ ID NO: 93 - DNA, 1571 bp, Homo sapiens
  misc_feature (1497): n equals a,t,g, or c
  misc_feature (1516): n equals a,t,g, or c
  misc_feature (1530): n equals a,t,g, or c
  misc_feature (1546): n equals a,t,g, or c
  misc_feature (1571): n equals a,t,g, or c
gagcctgattccatcaaaaagaaaggagtaaaaagcaagttacagcccagcagcacatctgctttccctgggtccgggggctgccasgagggascgggargtctgtccacctcacaaggcaggctctgtcagcttttgtcactccctgatttcttattctttgttaccttttttcgcctgactgatttttacttggcatttaagttccccttagcactgccagattctaaaaggttatattctttttaaaaaagaagagaaagaaagaaggaaagaagacaaagaaagaataaaaacctccgagtgttaactacttttccctttcttcttttttttataaagaatacattctttcacatcttgaatttctgtgaattttagtttccattctttctgcctttgcaaaccagacacctaaattatacgtsgaagctgttaaaaagttgtttttttttttttaatggaaaatatccaagaagcagcccaggagtatctgacatggtggaatggaatcagttagaaagcgaagaaatcactaaaaaaagttacttctttttttccccaccagttataatcttcaaccttactagtttataacagtttaatgtcctatagaaggatcctccactaaagttataattttaagtatagtcatatagagagatccctaatcccctgggtaatctagatactaaaggtggggaagaacagtcatattgacattctttaatccaaaaccactgtttgaaattagtaaggatattttcagcattcccaaaaacatgttattagcacgttgagctgaaaacgtttttcttcctcagtgagtacagaaaccaaagcagtctgcgtgtatgtctatgtatagactgtatcgtacctgggctcatggagtagtctaaatttaaaacgtcctctcttctacctccaatgaaaatgtttccgtgtgtggcgtctgatcttccaccgtgtgtgtggtcgtctgctggtgtagcgctgtttaaggagcgctgtgtgctgctagtgttccacgatgtgtgtggtcgtctgctggtgtagtagcactgtttgaggagcactgtgcgccgctagtgtgggtttacacttatgagtgttgtcattacatgtgttctgctcttctctccctctcctgcccctgccctgctccatcagagagagctgcaggtctctgctgccgcctagtagttccctgtcacaaagggatgccaaggcttaccgatctgtctgtcaaaaccaaagatgtctgggaaatccctcgagaatccctgcagttgatcaagagactgggaaatgggcagtttggggaagtatggatgggtatgctgagactcaattactctcttattagcttccccgtttggaagatcccaaacaccaaagatggaaggtgaaaataaagactgcgtgaccgggaagaaagtttgaattactaatagtggggaataataatttcagttttggttttaaacatctggnattcctaaaaaaaaaaaanaaaaaaaaaaaacncgggggggggcccggnacccaattccccccaaagggggggn

SEQ ID NO: 94 - DNA, 1872 bp, Homo sapiens
  misc_feature (4): n equals a,t,g, or c
  misc_feature (6): n equals a,t,g, or c
  misc_feature (51): n equals a,t,g, or c
  misc_feature (1271): n equals a,t,g, or c
gggnancccccccgggggggaaaacggatgggccccgggccccccaaaaantacccccgaggtttttttttttttttttgatttaataaagttttatttttccaaatgtacagctggttggacctattcatgcatcttcaccagcagctggagcatctccacccttggtatttctggtgtaaattacttgagctctgtgctttgaaaccagtttgataagtcctttactaaggagctcctgaagggctgccctggccagggagcctcgaatcttcagtctctcagagaccacwkcttctttttggccttgcccccggatttgttcactgggtctttgtctttcttggccgactttccagcgtccttcttcttcttgtcgtccttaggcggcattgcgaagctcggagaatagcagcagacaccgcagcctcgtcaagatgtcggacaaaaaggaagcgctgctcagaaacgkgcccaaaaaccaccgtccgctgtgagtacttccggggcaagaggcggagccaggcagargaagtcccacggcgaagcgctcgccctctagcctgaggcggaagacaggaagyggattctagttcccaagccgcaccgcctaaatactgccggagtctgcgctagttgtgacgcagtactatagcgctgttttcctgcactgataaacgaaaagcaatccaccaggtctcggcagctaactttccggcactacttatgcccgagcgtgtcgctcccagtgcgcaagtgcagcaggtggctgcacggggggcgcgggaggaggaggaggaggaggaggaggctggggtggggccggcggcaagtgctgtgatgcggttccggggaggggccgtcgggtagaggctgaataccagtttccgagcggcaaggcagcgatggcgatttttagtgtgtatgtggtgaacaaagctggcggcttgatttaccagttggacagctacgcgccacgggctgaggctgagaaaactttcagttatccgctggatctgctgctcaagctacacgatgagcgtgtgttggttgctttcggccagcgggacggcatccgagtgggtcatgcagtgctggccatcaatggcatggacgtgaatggcaggtacacggccgacgggaaagaggtgctggagtatctgggtaaccctgctaattacccggtgtccattcgatttggccggccccgcctcacttctaatgagaagcttatgctggcctccatgttccactcgctctttgccatcggntcccagctgtctcctgaacagggaagctcaggcattgagatgctggagacagacacattcaaattgcactgctaccagacactgacagggatcaagtttgtggttctagcagatcctaggcaagctggaatagattctcttctccgaaagatttatgagatttactcagactttgccctcaagaatccattctattccttagaaatgcctatcaggtgtgagctctttgaccagaacctgaagctagctctggaggtggcagagaaggctggaacttttggacctgggtcataggctgaacctgttatggacccccaaattctgagagttcctgcaacaagaatactgctgttgacactccagtggaaatcccagcagccttgttagtgcacttgaaagtgggagaatgctgaccctgatgacttgtactgattcctgagccttaacactgtgctctttccttctgtatataccatggtcttactttccaactctgtacagatttatttatggaggagctaggtccataaatgttgtaataaatattcctttgatcttggtgtttgcaaaaaaaaaaaaaaaaaaaactcgagactagcgg

SEQ ID NO: 95 - DNA, 1516 bp, Homo sapiens
  misc_feature (1505): n equals a,t,g, or c
ggagggcagaaagggagagtgctgggcgggcttagtcggagattgaggactgggaatccgcttccgggagggcactgtctagtgcacaggcaacctggccttsgcctcctagcccgagaagccgaatctccctaatccctgtgacctgtgtcacctctgcatcgcgaggagggggataagtggggagaagtctggtgtcagatgggatggcgccggaagagggtgccacagcggggacggaaggcgcccccaccccaactccacgggaatataaacaatttgtattttccgatcaggtggcgggacaggcttcattgggacagccctaacccagctgctgaatgccagaggccacgaagtacgttggtctcccgaaagcccgggcccggccggatcacgtgggatgagctcgctgcatcggggctgccgagctgcgatgccgccgtcaacctggccggagagaacatcctcaaccctctccgaagatggaatgaaaccttccaaaaagaggttctcggcagccgcctagagaccacccaattgctggctaaagccatcaccaaagccccacaaccccccaaggcctgggtcttagtcacaggtgtagcttactaccagcccagtctgactgcggagtatgatgaagacagcccaggaggggactttgactttttctccaacctcgtaaccaaatgggaagctgcagccaggcttcctggagattctacacgccaggtggtggtgcgctcaggggttgtgctgggccgtgggggtggtgccatgggccacatgctgctgccctttcgcctgggcctggggggccccatcggctcaggccaccaattcttcccctggatacacatcggggacctggcaggaatcctgacccatgcccttgaagcaaaccacgtgcacggggtcctgaatggagtggctccatcctccgccactaatgctgagtttgcccagaccttcggtgctgccctgggccgccgagccttcatccctctccccagcgctgtggtgcaagctgtctttgggcgacagcgtgccatcatgctgctggagggccagaaggtgatcccacggcgaacactggccactggctaccagtattccttcccagagctaggggctgccttaaaggaaattgtagcctaagtaggtcatggcaagggcctgaggcctgttcctcacaggcttccaggttaggcactgtgaataggctcagctcctctagagagctgaagccatctggttcttagattcctctcccagtcctctttcccattgttctgttgctccaccttattgtctcaaggccgtaatctcatcaggttgggacattaatcttttcaactccttgtaagatttcccggtttggtttctctacatgtcctgcagctgccccacttctcctttacgctgtgtagagaatgctctgcagtttaggcaataaaaataaattgtctcactaaaaaaaaaaaaaaaaattgggggggggncccgtacccat

SEQ ID NO: 96 - DNA, 1770 bp, Homo sapiens
  misc_feature (485): n equals a,t,g, or c
agtgccaggagtgggttccagatcgggagagctacgtgtcccacatgaaaaagagccacggtcggacattgaagcggtacccatgccggcagwgtgaacagtccttccacacccccaacagcctgcgcaaacacatccgcaacaaccatgacacagtaaagaagttctacacctgcgggtactgcacagaggacagccccagctttcctcggccctcccttctggagagccacatcagccttatgcatggcatcagaaaccctgatttgagccagacgtccaaagtgaaacctccgggtggacattcccctcaggtgaaccatctgaaaagaccagtcagtggagtgggggacgctccaggcaccagcaatggcgcaactgtctcttccaccaaaaggcacaagtccctttttcagtgcgcgaaatgtagttttgccacagactcggggctcgagtttcagagccacatacctcagcaccaggtnggacagytccacagcccaatgtctcctctgtggtttgtgctacacctctgccagctccctcagccgccacctcttcattgtccacaaggtgagagaccaggaggaggaggaggaagaggaggcggcggcacggagatggcagtggaggtggcagagcagaggagggctccggggargargtgcccatggagactagagagaatggactggaagaatgtgccggtgagccyttgtcagctgacccagaggcgaggagattgctgggcccggcccctgaggacgatggtggccacaatgatcacaktcaaccacaggcytytcaggaccaggacagccacacactgtcccctcaggtgtgaccggagactttgcagtgtgcatggtcaggggtggtgccgaagtgtcttccacctgccctgcggaccgtggaaaataaaaggctctgcccccagtgtgagtgtgaccggttgtaccctggagtagtgtctgccctgagctgccagtgctgggtatcccccagccccaggaaatgtggggtcggccaggaccctcacagctctgaatttgcttctgttatttatggcttttcgytgcttcttggtgccccatctcttgtctgtgtccttccaaccccaagctgcttatgtggcccaaccccactgctgtcaactaggcttgaaccccacagcggctgtgctcttctgggaggttcccgcttgctgccttcagccagggcgctcctcagagctctattttcctgcagacaccagctctccttcctgcctttagatcctgagaaggagggaaatgaggggtgctgacacagtccctctgggagagctctgcctagtctggtttggcgagggcccttgatcaccttgcccctcctccctgtcttctctgattcttttccctcaaaatagtcctgagaactaattgtcacactggctcatcatgtctctgtgggtggggtgggagaaacctctgctgcacacctctgtttggaacctgggcagagcaggaggtaaggcaaaggcaggcaggcaccaagaaccagaccccttgagaaggcgctgtgggtgggtctttgttctgctgttctgcctttcctgacaggtggggttggggcacacagacattggaatatttgtactgctctcgtgccatttgagaggcttgctgccccaggcaggccagcccctactcctcttggctacactcatgttkctcagactatatttcaaataaaaaatcttctcaccatgcaggtaggctcttgtattcc

SEQ ID NO: 97 - DNA, 938 bp, Homo sapiens
  misc_feature (183): n equals a,t,g, or c
  misc_feature (293): n equals a,t,g, or c
  misc_feature (360): n equals a,t,g, or c
  misc_feature (938): n equals a,t,g, or c
gcagaagaggggagattgggggagagatgacagctgcagggatggttgtragccgctagtratggagagcagagggagagggccaggctccaractcccacacgcccacacagcacctctgccaggcctaggagaagacaggtgcagctcttgcagctctgcgggtgtgcggccaaaggcaangcccacgggctggatgtcacttccccgactgtctcttggttggcttgtccttgtgcaagacccagcstgtcacgacagarcctgggcacttcagaggaggagccaggttngaatggtaaggggggaattggggtccaccatagtcttctgctctggtcctccacgggtgggaccagnatggaagtctcctgcctaacctcactgcattgcactggacctgggatgcctatccaccctctggcagaagacactcaccaggttatctgtgaagagactctgggatcccatcacctcaaagccagagggtccccaagtcaccgctgagagcacttgagcctcaaggatgtaagcctgaccataggatcttgactccaacagcggcaacccccacccccattgtggtccgtccttaacccatccactcttcttcggaggcaactgagaacacataaagcaagcagctacctagcatccccctcctaaagctttagactcagagcccagggtcccccacaagcctcaaggtagcctcaggtttctctaatttcctccactcccagttcgaagcaaacagcttactgcctagtccccgccaatcccaagggcgggctggctgatggcagcatggtgggctggcctgggtgtggagtgaaagagtcactgtggtgggggcgagaggaggacttgggagctggaggtgtgacaccttcagttctgttcctattaaaggaccttctgaagggcaaaaaaaaaan

SEQ ID NO: 98 - DNA, 311 bp, Homo sapiens
  misc_feature (297): n equals a,t,g, or c
  misc_feature (309): n equals a,t,g, or c
agatgcggctggagcagcagaagcagacggtccagatgcgcgcgcagatgcccgccttccccctgccctacgcccaggcatgtgccatcctcccgccacccagaggtttgtgggctgaggaccaactctcaccgctgtctctttcgtccccagctccaggccatgcccgcagccggaggtgtgctctaccagccctcgggaccagccagyttccccagcaccttcagcccygccggctcggtggagggctccccaatgcacggcgtgtacatgagccagccggtccctgccgctggnccctaccccagnat

SEQ ID NO: 99 - DNA, 620 bp, Homo sapiens
  misc_feature (368): n equals a,t,g, or c
  misc_feature (570): n equals a,t,g, or c
actgccggtcgttcggacgtcttgcctgtcgctggaggagaggtccgggctctccaggaaggtggctgcggcgacaaaatgaagatattcgtgggcaacgtcgacggggcggatacgactccggaggagctggcagccctctttgcgccctacggcacggtcatgagctgcgccgtcatgaaacagttcgccttcgtgcacatgcgcgagaacgcgggcgcgctgcgcgccatcgaagccctgcacggccacgagctgcggccggggcgcgcgctcgtggtggagatgtcgcgcccaaggcctcttaatacttggaagattttcgtgggcaatgtgtcggctgcatgcacgagccaggaactgcgcanctcttcgagcgccgcggacgcgtcatcgagtgtgacgtggtgaaagactacgcgtttgttcamatggagaaggaagcagatgccaaagccgcaatcgcgcagttcaacggcaaagaagtgaagggcaagcgcatcaacgtggaatctycaccaagggtcagaagaaggggcctggcctggctgtccagtcttgggacaagancaagaaaccaagggctggggataggccttccctggaatggtggctttctg

SEQ ID NO: 100 - DNA, 2511 bp, Homo sapiens
  misc_feature (12): n equals a,t,g, or c
  misc_feature (28): n equals a,t,g, or c
  misc_feature (44): n equals a,t,g, or c
  misc_feature (2456): n equals a,t,g, or c
  misc_feature (2488): n equals a,t,g, or c
  misc_feature (2511): n equals a,t,g, or c
gtaccattcccngaccgcttggcctgtncgattaatccgccccnataggaattggcccgggccagattcggccgagcaagcggaacctctgggaaaagcaatctgtggataaggtcacttcccccactaaggtttgagacagttccagaaagaacccaagctcaagacgcaggacgagctcagttgtagagggctaattcgctctgttttgtatttatgttgatttactaaattgggttcattatcttttatttttcaatatcccagtaaacccatgtatattatcactatatttaataatcacagtctagagatgttcatggtaaaagtactgcctttgcacaggagcctgtttctaaagaaacccatgctgtgaaatagagacttttctactgatcatcataactctgtatctgagcagtgataccaaccacatctgaagtcaacagaagatccaagtttaaaattgcctgcggaatgtgtgcagtatctagaaaaatgaaccgtagtttttgtttttttaaatacagaagtcatgttgtttctgcactttataataaagcatggaagaaattatcttagtaggcaattgtaacactttttgaaagtaacccatttcagatttgaaatactgcaataatggttgtctttaaaaaaaaaaaagaaatgtactgttaaggtattactttttttcatgctgatgattcatatctaaattacattattatgttagctgacagtggtactgattttttaggttggttgttttgtggatttctttagtagtgatagtagcctgaaccacattttagataactcaattatgtatgtatgtgcatacacatatacaaacacactaatggtagaatgcttttttatgtgctagactattatatttagtagtatgtcattgtaactagccaatatcacagcttttgaaaaattaaaaaatcacactatattaatatttcatatttgccaacagaaacatggcagataggtatcaatatgttttcaatgcctgatgacctataagaagaaagtattgaaaagaagagagattagaactgttagaaggagttgaaattttctaaaagacatagtatttagtttataattaaatgcattcttgaagtccagtgtgaattttattaatgctatcatctcgaccaagctcaaagcctacttattagaaacaatgaagttcacaataggtcataaggtctcttccttttctaaaattgaaagacaagaaatttagtgccaatattgtacagacagaaattccatgtatgagtctcaacaaagactacctttggctaaatgtctagaagcagagaagtaaagtgagcaaaatccagtgttgaggagtcatgacagtactttgatctttatatactctgaagcatttcttcaaacttttctacttttatttgtcattgatacctgtagtaagttgacaatgtggtgaaatttcaaaattatatgtaacttctactagttttactttctcccccaagtcttttttaactcatgatttttacacacacaatccagaacttattatatagcctctaagtctttattcttcacagtagataatgaaagagtcctccagtgtcttggcaaaatgttctagtatagctggatacatacagtggagttctataaactcatacctcagtggacttaaccaaaattgtgttagtctcaattcctaccacactgagggagcctcccaaataactattttcttatctgcagtattcctccagaagagctaaccagggcagggctggcatgagaagtgacatctgcgttacaaagtctatcttcctcataagtctgtaaagagcaattgaatcttctagctttagcaaacctaagccaaaggaaggaaagccacgaagaatgcagaagtcaaaccctcatgacaaagtaggcacaagtctacaataagctaaatcagaatttacaaatacaagtgtcccaggtagcattgactcccgtcattggagtgaaatggatcaaagtttgaattaaggcctatggtaaggtaacattgctttgttgtacttttgaacaagagctcctcctgatcactattacatatttttctagaaaatctaaagttcagaagagaatgtatcactgctgacttttattccaatatttggatggagtaagttttagggtagaattttgttcagtttggatttaatcttttgaaaagtaaattccttgtttactggtttgactataattctctgttatctttacgaggtaaaactgcaagctgactagcatgttctgtgaatctgccattcctaaaaattttataaacacttgatacttttcactgataatggatcgctccaataaacatatattgtgaaaatgcatccacaataaatggaattccttcctgcaaaaaaaaaaaaaaaaagggcggccgntctagaggatccaggcttacgtacgcgtgccngcgacgtccatagccccttctan

SEQ ID NO: 101 - DNA, 2981 bp, Homo sapiens
  misc_feature (293): n equals a,t,g, or c
cggacgcgtgggcggccacgttgtcttgcgcgctttgcccgcctggccctgggactctgaccctcggctaccctttcctgccccactagcgtggccgcgagcctcggtgagccggccgtattcccgctctcgcttagggggcacaggcgcaggcatcggcccggccactccaagccttcggtgcgcgggcgcgtctgggatacgggcccgggaggcgccgccctccgtccgcccggtgcctctcaggaacagcgaaccggagagagcgccggagagttgggctcagtgcrganctcggcgccggggcccatgcccgtgcgcccccgcaggccggcgccatggcctccgggagtktggccgagtgcctgcagcaggagaccacctgccccgtgtgcctgcagtacttcgcagagcccatgatgctcgactgcggccataacatctgttgcgcgtgcctcgcccgctgctggggcacggcagagactaacgtgtcgtgcccgcagtgccgggagaccttcccgcagaggcacatgcggcccaaccggcacctggccaacgtgacccaactggtaaagcagctgcgcaccgagcggccgtcggggcccggcggcgagatgggcgtgtgcgagaagcaccgcgagcccctgaagctgtactgcgaggaggaccagatgcccatctgcgtggtgtgcgaccgctcccgcgagcaccgcggccacagcgtgctgccgctcgaggaggcggtggagggcttcaaggagcaaatccagaaccagctcgaccatttaaaaagagtgaaagatttaaagaagagacgtcgggcccagggggaacaggcacgagctgaactcttgagcctaacccagatggagagggagaagattgtttgggagtttgagcagctgtatcactccttaaaggagcatgagtatcgcctcctggcccgccttgaggagctagacttggccatctacaatagcatcaatggtgccatcacccagttctcttgcaacatctcccacctcagcagcctgatcgctcagctagaagagaagcagcagcagcccaccagggagctcctgcaggacattggggacacattgagcagggctgaaagaatcaggattcctgaaccttggatcacacctccagatttgcaagagaaaatccacatttttgcccaaaaatgtctattcttgacggagagtctaaagcagttcacagaaaaaatgcagtcagatatggagaaaatccaagaattaagagaggctcagttatactcagtggacgtgactctggacccagacacggcctaccccagcctgatcctctctgataatctgcggcaagtgcggtacagttacctccaacaggacctgcctgacaaccccgagaggttcaatctgtttccctgtgtcttgggctctccatgcttcatcgccgggagacattattgggaggtagaggtgggagataaagccaagtggaccataggtgtctgtgaagactcagtgtgcagaaaaggtggagtaacctcagccccccagaatggattctgggcagtgtctttgtggtatgggaaagaatattgggctcttacctccccaatgactgccctacccctgcggaccccgctccagcgggtggggattttcttggactatgatgctggtgaggtctccttctacaacgtgacagagaggtgtcacaccttcactttctctcatgctaccttttgtgggcctgtccggccctacttcagtctgagttactcgggagggaaaagtgcagctcctctgatcatctgccccatgagtgggatagatgggttttctggccatgttgggaatcatggtcattccatggagacctccccttgaggaggtgaattcaggccaaaagggctgttggctgtaatcctacgccaggcacaaggcatcttgttgccttgccacgtcctgtcacagctgggtatccttaccatgttccacgcccttgcagtgggagacaggatgtccatgttctctaccatccttttccttcccatgcagattgtgaaatgtaatgagatgtatcaagatatcctagaaataaaaaccagatgtccacctccagtgtttcatactttctggttttacacatcgctggagggataaagagtatggataatctttggatttggagagccgttcaagatacttccagcttcttggctcagcctggcttcctctggttcagccccacataatgattatggctatttgctgtcatttctgggctagggctcctttctaacaacctagactggaataaggccctgtcagcatggctccctttatcccagttttccgtctgggaacagtacctctgcccctgattcccaatgtgccatagttttattaactccattaaagaagcctgtatgtgttttggttagttacagttattttacaataatggtgggtaatggccccacctctgttatgagataatgttctaatcaatgtctctgcctttgtatcttttctgagggctttgtctgttctcttcattctaatgaaaggtgtattctagtgctgggtgcatatcatccaggataatattctgcccaactccatcctctgttactagatcccttaccagtcacatttgtggactggtggccagtcgtataccatccctggaaggattctgggacaatattccagggattcattgacttcttggctccttttctccatttcctttgggggaagggggaattgaccatgcttaagtgcatcctatcaaggggcagctccgtccccatggccattggatcatgagacactctgaagtcagaaggctggggcagatcacttcaagcaagcccccatgatggttctcagtcctgcttctctgtgggtacgtgcccctctgtttaaaaataaactgaatatggatgtttaaaaaaaaaaaaaaaaaaaaaaaaaaaaaaaaag

SEQ ID NO: 102 - DNA, 2804 bp, Homo sapiens
ccaaggacacaggtgaaaggttgagccatgcagtaggctgtgcttttgcagcctggtttagagcgcaacaggaagcggcgagaaggaatgtggagtgactgctacttttgatgctagtcggaccacttttacaagagaaggatcattccgtgtcacaacagccactgaacaagcagaaagagaggagatcatgaaacaaatgcaagatgccaagaaagctgaaacagataagatagtcgttggttcatcagttgcccctggcaamactgccccatccccatcctctcccacctctcctacttctgatgccacgacctctctggagatgaacaatcctcatgccatcccacgccggcatgctccaattgaacagcttgctcgccaaggctctttccgaggttttcctgctcttagccagaagatgtcaccctttaaacgccaactatccctacgcatcaatgagttgccttccactatgcagaggaagactgatttccccattaaaaatgcagtgccagaagtagaaggggaggcagagagcatcagctccctgtgctsacagatcaccaatgccttcagcacacctgaggaccccttctcatctgctccgatgaccaaaccagtgacagtggtggcaccacaatctcctaccttccaagggaccgagtggggtcaatcttctggtgctgcctctccaggtctcttccaggccggtcatagacgtactccctctgaggccgaccgatggttagaagaggtgtctaagagcgtccgggctcagcagccccaggcctcagctgctcctctgcagccagttctccagcctcctccacccactgccatctcccagccagcatcacctttccaagggaatgcattcctcacctctcagcctgtgccagtgggtgtggtcccagccctgcaaccagcctttgtccctgcccagtcctatcctgtggccaatggaatgccctatccagcccctaatgtgcctgtggtgggcatcactycctcccagatggtggccaacgtatttggcactgcaggccaccctcaggctgcccatccccatcagtcacccagcctggtcaggcagcagacattccctcactacgaggcaagcagtgctaccaccagtcccttctttaagcctcctgctcagcacctcaacggttctgcagctttcaatggtgtagatgatggcaggttggcctcagcagacaggcatacagaggttcctacaggcacctgcccagtggatccttttgaagcccagtgggctgcattagaaaataagtccaagcagcgtactaatccctcccctaccaaccctttctccagtgacttacagaagacgtttgaaattgaactttaagcaatcattatggctatgtatcttgtccataccagacagggagcagggggtagcggtcaaaggagcaaaacagactttgtctcctgattagtactcttttcactaatcccaaaggtcccaaggaacaagtccaggcccagagtactgtgaggggtgattttgaaagacatgggaaaaagcattcctagagaaaagctgccttgcaattaggctaaagaagtcaaggaaatgttgctttctgtactccctcttcccttacccccttacaaatctctggcaacagagaggcaaagtatctgaacaagaatctatattccaagcacatttactgaaatgtaaaacacaacaggaagcaaagcaatctccctttgtttttcaggccattcacctgcctcctgtcagtagtggcctgtattagagatcaagaagagtggtttgtgctcaggctggggaacagagaggcacgctatgctgccagaattcccaggagggcatatcagcaactgcccagcagagctatattttgggggagaagttgagcttccattttgagtaacagaataaatattatatatatcaaaagccaaaatctttatttttatgcatttagaatattttaaatagttctcagatattaagaagttgtatgagttgtaagtaatcttgccaaaggtaaaggggctagttgtaagaaattgtacataagattgatttatcattgatgcctactgaaataaaaagaggaaaggctggaagctgcagacaggatccctagcttgttttctgtcagtcattcattgtaagtagcacattgcaacaacaatcatgcttatgaccaatacagtcactaggttgtagttttttttaaataaaggaaaagcagtattgtcctggttttaaacctatgatggaattctaatgtcattattttaatggaatcaatcgaaatatgctctatagagaatatatcttttatatattgctgcagtttccttatgttaatcctttaacactaaggtaacatgacataatcataccatagaagggaacacaggttaccatattggtttgtaatatgggtcttggtgggttttgttttatcctttaaattttgttcccatgagttttgtggggatggggattctggttttattagctttgtgtgtgtcctcttcccccaaacccccttttggtgagaacatccccttgacagttgcagcctcttgacctcggataacaataagagagctcatctcatttttacttttgaacgttggccttacaatcaaatgtaagttatatatatttgtactgatgaaaatttataatctgctttaacaaaaataaatgttcatggtagaagcttttkcccatgaagggctgttctttcccctttcctttattagtaaatgaatttatttttaaaaaa

SEQ ID NO: 103 - DNA, 722 bp, Homo sapiens
cgggaagaggcggacagcgaggccaagatttcagctgcgggacggtcaggggagacctccaggcgcagggaaggacggccagggtgacacggaagcatgcgacggctgctgatccctctggccctgtggctgggygcggtgggcgtgggcgtcgccgagctcacggaagcccagcgccggggcctgcaggtggccctggaggaatttcacaagcacccgcccgtgcagtgggccttccaggagaccagtgtggagagcgccgtggacacgcccttcccagctggaatatttgtgaggctggaatttaagctgcagcagacaagctgccggaagagggactggaagaaacccgagtgcaaagtcaggcccaatgggaggaaacggaaatgcctggcctgcatcaaactgggctctgaggacaaagttctgggccggttggtccamtgccccatagagacccaagttytgcgggagacccagtgcctcagggtgcagcgggctggtgaggacccccacagcttctacttccctggacagttcgccttctccaaggccctgccccgcagctaagccagcactgagmtgcgtggtgcctccaggaccgctgcgggtggtaaccagtggaagaccccagcccccagggagaggaacccgttctatccccagccatgataataaagctgctctcccagctgcctctcaaaaaaaaaaaaaaaaaaaaa

SEQ ID NO: 104 - DNA, 1636 bp, Homo sapiens
tacggctgcgagaagacgacagaaggggggctatctgaagaggacggggacgggagcctgctctacagcgtggtcaacacggccgagcgacgctgatgaggaggagacccacccggtgacttgagctcgctctccagtaagctactcccaggcttcaccacgctgggcttcaaagacgagagaagaaacaaagtcacctttctctccagtgccactactgcgctttcgatgcagaataattcagtatttggcgacttgaagtcggacgagatggagctgctctactcagcctacggagatgagacaggcgtgcagtgtgcgctgagcctgcaggagtttgtgaaggatgctgggagctacagcaagaaagtggtggacgacctcctggaccagatcacaggcggagaccactctaggacgctcttccagctgaagcagagaagaaatgttcccatgaagcctccagatgaagccaaggttggggacaccctaggagacagcagcagctctgttctggagttcatgtcgatgaagtcctatcccgacgtttctgtggatatctccatgctcagctctctggggaaggtgaagaaggagctggaccctgacgacagccatttgaacttggatgagacgacgaagctcctgcaggacctgcacgaagcacaggcggacgcggcggctctcggccktcgtccaacctcagctccctgtccaacgcctccgagagggaccagcaccacctgggaagcccttctcgcctgagtgtcggggagcagccagacgtcacccacgacccctatgagtttcttcagtctccagagcctgcggcctctgccaagacctaactctagaccaccttcagctcttttattttatttttttagttttattttgcacgtgtagagtttttgtcatcagacaaggactttgatcctgtcccctttggcatgcgggaagcagccgcggcggaggtaatgaattgtctgtggtatcatgtcagcagagtctccaagccccacgaaccctgaggagtggagtcatacgcgaaggccatatggcatcgtgtcagcagagagagtctctgtacacagccccgtgaaccctgaggagtggagtcatacacgaagggcgtgtggccatcgtgtcagcagagagagtctctgtacacagccccgtgaaccctgaggagtggagtcatacgcgaagggtgtgtggccaggctgcagagctgcgtgccgtttgtgtccgagcatcacgtgtggctccagcccttgtttctgccagtgtagacacctctgtctgccccactgtcctggggtcgctcttgggaggcacaggcatgggtgtgtctggcctcattctgtatcagtccagtgtgttcctgtcatagtttgtgtctcccaggcaggccatggtaggggcctcgcaggggccattggggagcacagggccaggctggggtgaggagagctcccctgttttctgtttaattgatgagcctgggaaaggagtgtgttctgcctgcccgttacagtggagcgttccgtgtccataaaacgttttctaactggraaaaaaaaaaaaaaaaaaaaaaaaaaaaaaaaaaaaaaaaaaaaaaaaaaggggggggggg

SEQ ID NO: 105 - DNA, 1561 bp, Homo sapiens
caggcgggaacatggccaccgagacccaaatgtggtgccaggtcctcccaagccagcaaaggagaaacctcccaaaaagaaggcccaggacaaaattcttagtaatgagtatgaggagaagtatgacctcagccggcctactgcctctcagctggaggacgagctgcaggtggggaatgttccccttaaaaaagcaaaggagtctaaaaagcatgaaaagcttgagaaaccagagaaggagaagaaaaaaaagatgaagaatgagaacgcagacaagttacttaagagtgaaaagcaaatgaagaagtctgagaaaaagagcaagcaagagaaagagaagagcaagaagaaaaaaggaggtaaaacagaacaggatggctatcagaaacccaccaacaaacacttcacgcagagtcccaagaagtcagtggccgacctgctggggtcctttgaaggcaaacgaagactccttctgatcactgctcccaaggctgagaacaatatgtatgtgcacaacgtgatgaatatctggaaagtttctgcaagatggctaccaggaaaatctctgtgatcaccatcttcggccctgtcaacaacagcaccatgaaaatcgaccactttcagctagataatgagaagcccatgcgagtggtggatgatgaagacttggtagaccagcgtctcatcagcgagctgaggaaagagtacggaatgacctacaatgacttcttcatggtgctaacagatgtggatctgagagtcaagcaatactatgaggtaccaataacaatgaagtctgtgtttgatctgatcgatactttccagtcccgaatcaaagatatggagaagcagaagaaggagggcattgtttgcaaagaggacaaaaagcagtccctggagaacttcctatccaggttccggtggaggaggaggttgctggtgatctctgctcctaacgatgaagactgggcctattcacagcagctctctgccctcagtggtcaggcgtgcaattttggtctgcgccacataaccattctgaagcttttaggcgttggagaggaagttgggggagtgttagaactgttcccaattaatgggagctctgttgttgagcgagaagacgtaccagcccatttggtgaaagacattcgtaactattttcaagtgagcccggagtacttctccatgcttctagtcggaaaagacggaaatgtcaaatcctggtatccttccccaatgtggtccatggtgattgtgtacgatttaattgattcgatgcaacttcggagacaggaaatggcgattcagcagtcactggggatgcgctgcccagaagatgagtatgcaggctatggttaccatagttaccmccaaggataccaggatggttaccaggatgactaccgtcatcatgagagttatcaccakggatacccttactgagcagaaatatgtaaccttagactcagccagtttcctctgcagctgctaaaactacatgtggccagctccattcttccacactgcgtactacattcctgcctttttcccttcatgt

SEQ ID NO: 106 - DNA, 486 bp, Homo sapiens
tcgacccacgcgtccgcccacgcgtccggaaagcagtgtcaagacagtaaggattcaaaccatttgccaaaaatgagtctaagtgcatttactctcttcctggcattgattggtggtaccagtggccagtactatgattatgattttcccctatcaatttatgggcaatcatcaccaaactgtgcaccagaatgtaactgccctgaaagctacccaagtgccatgtactgtgatgagctgaaattgaaaagtgtaccaatggtgcctcctggaatcaagtatctttaccttaggaataaccagattgaccatattgatgaaaaggcctttgagaatgtaactgatctgcagtggctcattctagatcacaaccttctagaaaactccaagataaaagggagagttttctctaaattgaaacaactgaagaagctgcatataaaccacaacaacctgacagagtctgtgggcccacttcccaaatct

SEQ ID NO: 107 - DNA, 800 bp, Homo sapiens
cttgtatctgatcgttctaaaaaagagttgtccccggttttaaccagtgaagttcatagtgttcgtgcaggacggcatcttgctaccaaattgaatattttagtacagcaacattttgacttggcttcaactactattacaaatattccaatgaaggtgattcgcatctaggtggcggcagtcgagaaggctcgtttaaagaaacaataacattaaagtggtgtacaccaaggacaaataacattgaattacactattgtactggagcttatcggatttcacctgtagatgtaaatagtagaccttcctcctgccttactaattttcttctaaatggtcgttctgttttattggaacaaccacgaaagtcaggttctaaagtcattagtcatatgcttagtagccatggaggagagatttttttgcacgtccttagcagttctcgatccattctagaagrtccaccttcaattagtgaaggatgtggaggaagrgttacagactaccggattacagattttggtgaatttatgagggaaaacagattaactccttttctagaccccagatataaaatcgatggaagtcttgaggtccctttggaacgagcaaaagatcagttagaaaaacatacccgttactggcctatggatcatttcacaaaccaccatttttaacakgcaagcggtagttccattagccagtgttattgtggaaagatcyctggacagaggaagatgtggttwaaacggtccaaaaaacatwttccaacttggttggataaggggaaggaaaaaagg

SEQ ID NO: 108 - DNA, 1058 bp, Homo sapiens
  misc_feature (895): n equals a,t,g, or c
  misc_feature (1019): n equals a,t,g, or c
  misc_feature (1054): n equals a,t,g, or c
ggcacgagcgtgactggcgccgaaatgggagaaagcagcgagtgagaggggaaggggcgccaggcgagcacccgggagccagcgggacctgggcaggggcgcccggagcaggccgcatggcgggccccgcgcggggatccggctggaagagagcgtacacggctcgcacgagtccggggccgatgtaccaggtgagcggccagccccctctggctgcgacgcgcccttatggagcccccagcgcamcccgggcccagcccagaccytatyccttccttcctgggctggargtaktaacaggatccactcaccctgcggaggcagcaccagaggagggctccctggaggaggcggcaacccccatgccccaaggcaatggccctggcatcccccagggcctggacagcactgacctcgacgtccccacagaagctgtgacatgccagcctcaggggaacccttgggctgcaccccacttctgccgaatgactctggccacccctcagagctgggcggcaccagacgggcggggaatggtgccctgggtggccccaaggcccaccggaagttgcagacacacccatctctcgccagccagggcagcaagaagagtaagagcagcagcaaatccaccacctcccagatccccctccaggcacaggaagactgctgtgtccactgcatcctgtcctgcctgttctgcgagttcctgacgctgtgcaacatcgtcctggactgcgccacctgtggctcctgcagctcggaggactcgtgcctctgctgctgctgctgtggctctggcgagtgtgccgactgcgacctgccctgcgacctggactgcggcatcctggatgcctgctgcgagtccgcggactgcctggaaatctgcatggantgctgtgggctctgcttctcctcctgagcctctgtcgggggctaagccagcctggcgcccctgcagattccagcagggtccctctgagtggggccaggcccaggactgtcacacaaggcttganaaagcccctctccctggtcctctcctacccacccntgtc

SEQ ID NO: 109 - DNA, 1076 bp, Homo sapiens
  misc_feature (780): n equals a,t,g, or c
caggaggaagcaggaagaaacaggaggaggaacctgagacagagccgctgaagtccttgctggaagcagatgggattaaatgagcgacgagactgggagagtgccagagagagacaccaagaggatgcaggtctgtctgctatcagctatgccgctgcccgttgcgctgcagacccgcttggccaagagaggcatcctcaaacatctggagcctgaaccagaggaagagatcattgccgaggactatgacgatgatcctgtggactacgaggccaccaggttggagggcctaccaccaagctggtacaaggtgttcgacccttcctgcgggctcccttactactggaatgcagacacagaccttgtatcctggctctccccacatgaccccaactccgtggttaccaaatcggccaagaagctcagaagcagtaatgcagatgctgaagaaaagttggaccggagccatgacaagtcggacaggggccatgacaagtcggaccgcagccatgagaaactagacaggggccacgacaagtcagaccggggccacgacaagtytgacagggatcgagagcgtggctatgacaaggtagacagagagagagagcgagacagggaacgggatcgggaccgcgggtatgacaaggcagaccgggaagagggcaaagaacggcgccaccatcgccgggaggagctggctccctatcccaagagcaagaaggcagtaagccgaaaggatgaagagttagaccccatggaccctagctcatactcagnacgcccccggggcacgtggtcaacaggactccccaagcggaatgaggccaagactggcgctgacaccacagcagctgggcccctcttccagcagcggccgtatccatccccaggggctgtgctccgggccaatgcagaggcctcccgaaccaagcagcaggattgaagcttcggcctccctggccctgggttaaaataaaagctttctggtgatcctgcccaccaaaaaaaaaaaaaaaaaaaaaaaaaaaaaaaaaaaaaaaaaaaaaawaaaaaaattttggggggggccccct

SEQ ID NO: 110 - DNA, 1199 bp, Homo sapiens
gttggtggagttctgcccggatggaagctccggccgcggagtgatggtggcctcagcgaagatgggccgggcagggaccatggcggtggcagcagaggtggcaggggcggggcggctggcggtagaggaggctgtggtcctcagggggctgtaggtggaggtatggctcgggccagcagcgggaacggcagcgaggaggcctggggggcacttcgggcgccgcaacagcagcttcgagagctgtgcccaggagtgaacaaccagccctacctctgtgagagtggtcactgctgcggggagactggctgctgcacctactactatgagctctggtggttctggctgctctggactgtcctcatcctctttagctgctgttgcgccttccgccaccgacgagctaaactcaggctgcaacaacagcagcggcagcgtgaaatcaacttgttggcctatcatggggcatgccatggggctggtcctttccctaccggttcactgcttgaccttcgcttcctcagcaccttcaagcccccagcctacgaggatgtggttcaccgcccaggcacaccaccccccccttatactgtggccccaggccgccccttgactgcttccagtgaacaaacctgctgttcctcctcatccagctgccctgcccactttgaaggaacaaatgtggaaggtgtttcctcccaccagagtgccccccctcatcaggagggtgagcccggggcaggggtgacccctgcctccacacccccctcctgccgctatcgccgtttaactggcgactccggtattgagctctgcccttgtcctgcctccggtgagggtgagccagtcaaggaggtgagggttagtgccaccctgccagatctggaggactactccccgtgtgcactacccccagagtctgtaccgcagatctttcccatggggctgtcttccagtgaaggggacatcccataagtagttttgagagggtggatgggttacttgcccaccagaaacagccctagtcccaactccttgcgttcctttggcccctccctgcctacctagaatctgcctgaaagggctggagaggggcagtattgggggactgtgctagctttacccccgcaggacatacacaggagcctttgatctcattaaagagatgtgaaccagctaaaaaaaaaaaaaaaaaactcgag

SEQ ID NO: 111 - DNA, 3630 bp, Homo sapiens
  misc_feature (3606): n equals a,t,g, or c
  misc_feature (3608): n equals a,t,g, or c
cggcgttgttcagtcagagcgagaacattccagaggtcgcccagctccggcgctgacgggtgtggaccgcggacgtcgctgggacagcccctccccgctgctcggcggcggcacctggcccggccgctcctcgctgcgcttcgcctccgcctcctcggactcggactcgggtttatatcgcgcctcacttcatcccagtcccgggcgagcagcgttgggtttatgtctttatttgacgaaaacgacagaagataccaaaaagttgcaatcaaagatctcttcatcttattgataaagccactaataagccaaaatgtctgtcaatgtcaaccgcagcgtgtcagaccagttctatcgctacaagatgccccgtctgattgccaaggttgagggcaaaggcaatggaatcaagacagttatagtcaacatggttgacgttgcaaaggcgcttaatcggcctccaacgtatcccaccaaatattttggttgtgagctgggagcacagacccagtttgatgttaagaatgaccgttacattgtcaatggatctcatgaggcgaataagctgcaagacatgttggatggattcattaaaaaatttgttctctgtcctgaatgtgagaatcctgaaacagatttgcatgtcaatccaaagaagcaaacaataggtaattcttgtaaagcctgtggctatcgaggcatgcttgacacacatcataaactctgcacattcattctcaaaaacccacctgagaatagtgacagtggtacaggaaagaaagaaaaagaaaagaaaaacagaaagggcaaagacaaggaaaatggctccgtatccagcagtgagacaccaccaccaccaccaccaccaaatgaaattaatcctcctccacatacaatggaagaagaggaggatgatgactggggagaagatacaactgaggaagctcaaaggcgtcgaatggatgaaatcagtgaccatgcaaaagttctgacactcagtgatgatttggaaagaacaattgaggagagggtcaatatcctctttgattttgttaagaaaaagaaagaagagggtgttattgattcatctgacaaagaaatcgttgctgaagcagaaagactggatgtaaaagccatgggccctcttgttctaactgaagttctttttaatgagaagattagagaacagattaagaaatacaggcgccatttcctacgattttgtcacaacaacaaaaaagcccaacggtaccttcttcatggtttggagtgtgtggtagcaatgcatcaagctcagcttatctccaagattccacatatcttgaaggagatgtacgatgcagaccttttagaagaagaggtcatcatcagctggtcggaaaaggcctctaagaaatatgtctccaaagaacttgccaaagagattcgtgtcaaagcagaaccatttataaaatggttgaaggaggcagaggaagaatcttctggtggcgaagaagaagatgaagatgagaacattgaggtggtgtattcgaaggctgccagtgtaccgaaagttgagactgtaaagtcagacaacaaggatgacgacatcgatattgatgccatttaaagggatggatgcaacctagcttaacagtataatgctgcaaattttcctccattatcagccagaagtgcaacatgtatgtgcaaaagctaaaatggcttaacatcatgctacactttacactaaaaatctattactgtgagtggtctgttattaagcccaatgagacatctagggagtccatacacatcagtgagcagatgtagtttgcttatttatagcatgtttctttttgaaaaactagtggtggacacatttggatcacatttatacagttataaaaataaaggtttgattttggtcgttcttcagatgtttggctctgaatgacttaagctgaagtaactggctccttactttaaatgttctgccatcatttcacctgatgagcattcttggagcctgccagatattgttaggtcctggggctgcaaagaggtcctcaacaggatgtaaagcaaacttaattgtaattaatttattcagcccattaagaaagtactaaagttttatctctgtagttcctcaaattggcatctggtaatgtacattgtgaggtagactgataatgaaatgacagtgcaacatcttaaccaagaagtaaatatgacctcagtgtcctataaataatgtaagagcaggatttgaaacttggagagctgttttctcatttcatgtacacttgccccaaattgtctttgaagtcgtgtgcattgcacgttggatgagccagggaaattattacattaacaagcattttgtgtgtacgtagtagttactttgtactgagagaacttgctttggggtgcaattaataaactgattttatttgggagaaacaaggaagggtgcacttaactagcaacctaagcatgatttttcagcttttgcccttagggtttaaattacaattccaaaatgttagacatactgtattttttcgttcagtgtggctttaattttcccctcttgcagtttgttctgtaatgccttttacatttggacacatagtttatscttttttttggtgtaagacttgggatattttttacttcacattgaatatagccaggcacccaagaagtctgatggccacctgagtgcaggtgacaaggacctgacagagcccatgcagggctttagatttggacacacaagagttgataacttcctcatgaactccttgcctgatctaaactcatattatgggttctgactgtttgagtaatcatcttcaaggttaaacctcttggcagttacccttttcacaaagtgcacagtgggaatcgagaatcgatagggttaattttggagcagtggcttataccattcacctctgtttttttgtgattatttcacagataatgagaccttaataacaaataggcgtaaaaaaattttcacattgaaatgatagaaacatttgatgtaataaaacttggttggcttgatattttaaggaattgaaacctagcaatcttattggagagacaagaattggtctccagctgcctttgatcaagattcgggtgcaagtggagcaggagccatatacctggagggaatgtgctttgtcacaccaaagaggatttttttttcttcaaacttgtatgttgcctaggtttcaaattctttgccgcaaggctgatctgctttcattaactggaattctgtaggagatactggtgacctaagctaagttgcactcagcatactcagtgtcaagctaatgaggttctattataaaggttctacttttaatctgagggaaaacatgttcagggcttctagaacactaaaaaatttggcttaaaccagtgttcagtctggtgccaaacttcgaatggaatacaaattcacataatctgaactttgttcacaggttatcctaatagagtaattcttcactttgctctattgaactgtcttaaggatttgtttaaacagctaagttacttgattaaaataatgataaaattgtaaaaaaaaaaaaaaaaaantnctgsggtccgtcaagggaattc

SEQ ID NO: 112 - DNA, 1526 bp, Homo sapiens
  misc_feature (1496): n equals a,t,g, or c
  misc_feature (1511): n equals a,t,g, or c
  misc_feature (1512): n equals a,t,g, or c
  misc_feature (1515): n equals a,t,g, or c
tcgacccacgcgtccgcagcaggccctgcgcgcggcaacatggcggggtccaggtggaggtcttgaggctatcagatcggtatggcattggcgtccgggcccgcaaggcgggcgctagctggctccgggcagctcggccttgggggcttcggggccccgagacgcggggcgtatgagtggggcgtgcgctccacgcggaagtcggagcctcctcccctggatagggtgtacgagatccctggactggagcccatcacctttgcggggaagatgcacttcgtgccctggctggcgcggccgatctttccgccctgggaccgcggctacaaggacccaaggttctaccgctcgccccctcttcacgagcatccgctgtacaaagaccaggcctgctatatctttcaccaccgttgccgccttctcgagggtgtaaagcaggccctctggctcaccaagaccaagttaatagaaggccttcccgagaaagtgcttagccttgttgatgatccaaggaaccacatagagaaccaagacgagtgcgttctgaatgtgatctctcacgcccgtctctggcagaccactgaggaaatccccaagagagagacctactgcccggtcatcgtggacaacctaatacagctgtgtaaatctcagattctcaagcatccttctctggccaggaggatctgtgtccaaaactccacgttttctgctacctggaaccgagagtctcttctccttcaagtccgtggttctggtggagcccgactgagcactaaggatcctctgcccaccatcgcctccagagaggagattgaagctactaagaatcatgttctagagaccttctaccccatatcacccatcatcgatcttcatgaatgcaatatttatgatgtgaaaaatgacacaggattccaggaaggctatccttacccctatccccataccctgtacttactggacaaagccaatttacgaccacaccgccttcaaccagatcagctgcgggccaagatgatcctgtttgcttttggcagtgccctggctcaggcccggctcctctatgggaatgatgccaaggtcttggagcagcccgtggtggtgcagagcgtgggcacggatggacgtgtcttccatttcctagtgtttcaactgaataccacagacctggactctaacgagggtgtcaagaatttggcctgggtggactcagaccagctcctctatcagcatttttggtgtctcccagtgatcaaaaagagagtggttgtggaacctgttggcccagttggtttcaagccagagacattcagaaagtttttagctctatatttgcatggtgctgcgtgagcggaggacccctctgaatcctgaaacccctcttgcctctcttccacggaagaggcctgggccccgtggagcctcagtgcccgtttggcctgctgctctcgctgacaataaagagcccttgcgttgcaaaaaaaaaaaaaaanggggggccgctcaannggncccaagttagt

SEQ ID NO: 113 - DNA, 585 bp, Homo sapiens
  misc_feature (422): n equals a,t,g, or c
tcgacccacgcgtccgcccacgcgtccgcccacgcgtccgggagcccggtgacaggatgttggtgttggtattaggagatctgcacatcccacaccggtgcaacagtttgccagctaaattcaaaaaactcctggtgccaggaaaaattcagcacattctctgcacaggaaacctttgcaccaaagagagttatgactatctcaagactctggctggtgatgttcatattgtgagaggagacttcgatgagaatctgaattatccagaacagaaagttgtgactgttggacagttcaaaattggtctgatccatggacatcaagttattccatggggagatatggccagcttagccctgttgcagaggcaatttgatgtggacattcttatctygggacacacacacaaatttgaagcattngagcatgaaaataaattctacattaatccaggttctgccactggggcatataatgccttggaaacaaacattattycatcattgtgttgatggatatccaggcttctacagtggkcacctatgtgtaatcagctaattggagatgaagtgaaagtagaacgga

SEQ ID NO: 114 - DNA, 501 bp, Homo sapiens
gatgaaaagaaggtttttgctcttcaaatgcttaagtaaactaaaaggcagagctggaaataaagcccgtattgtggactccaagtaatgctctttctgctacaccatactttgtggtgtctgctcccatgtgcttcttcgctaaggctgatcaaaaaagttagtaggttgcttcagctataagaatttgatggtcttccttagtcatcatagtctgcagcaatcatttttgttcatcattgggatgtctgcttactcctgttgagtaaatgtgatctattcacccttggragctccttgcacaccaacagtattcttggatagggacaagtgttgtctaagtcagtgacgatttctttagcataataaaaggctccatgtaggatgctaatacttgagtgaaatatgcttcataagcagccttgttttgacagagttggtgtaaagtgaggttatgtcttggcctgagcgtcttcaaagcatgtgccactttgtgcatct

SEQ ID NO: 115 - DNA, 1965 bp, Homo sapiens
  misc_feature (338): n equals a,t,g, or c
  misc_feature (343): n equals a,t,g, or c
agaggcggcactggcggcaagagcagacgcccgaaccgagcgagaagagcggcagagccttatcccctgaagccgggccccgcgtcccagmcctggcccaaaggcaggagcagcagacaagagtgcagtggtggctgccgccgcaccagcctcagtggcagatgacacaccaccccccgagcgtcggaacaagagcggtatcatcagtgagcccctcaacaagagcctgcgccgctcccgcccgctctcccactactcttcttttggcagcagtggtggtagtggcggtggcagcatgatgggcggagagtctgctgacaaggccactgcggctgcancctgncctccctgttggccaatgggcatgacctggcggcggccatggcggtggacaaaagcaaccctacctcaaagcacaaaagtggtgctgtggccagcctgctgagcaaggcagagcgggccacggagctggcagccgagggacagctgacgctgcagcagtttgcgcagtccacagagatgctgaagcgcgtggtgcaggagcatctcccgctgatgagcgaggcgggtgctggcctgcctgacatggaggctgtggcaggtgccgaagccctcaatggccagtccgacttcccctacctgggcgctttccccatcaacccaggcctcttcattatgaccccggcaggtgtgttcctggccgagagcgcgctgcacatggcgggcctggctgagtaccccatgcagggagagctggcctctgccatcagctccggcaagaagaagcggaaacgctgcggcatgtgcgcgccctgccggcggcgcatcaactgcgagcagtgcagcagttgtaggaatcgaaagactggccatcagatttgcaaattcagaaaatgtgaggaactcaaaaagaagccttccgctgctctggagaaggtgatgcttccgacgggagccgccttccggtggtttcagtgacggcggcggaacccaaagctgccctctccgtgcaatgtcactgctcgtgtggtctccagcaagggattcgggcgaagacaaacggatgcacccgtctttagaaccaaaaatattctctcacagatttcattcctgtttttatatatatattttttgttgtcgttttaacatctccacgtccctagcataaaaagaaaaagaaaaaaatttaaactgctttttcggaagaacaacaacaaaaaagaggtaaagacgaatctataaagtaccgagacttcctgggcaaagaatggacaatcagtttccttcctgtgtcgatgtcgatgttgtctgtgcaggagatgcagtttttgtgtagagaatgtaaattttctgtaaccttttgaaatctagttactaataagcactactgtaatttagcacagtttaactccaccctcatttaaacttcctttgattctttccgaccatgaaatagtgcatagtttgcctggagaatccactcacgttcataaagagaatgttgatggcgccgtgtagaagccgctctgtatccatccacgcgtgcagagctgccagcagggagctcacagaaggggagggagcaccaggccagctgagctgcacccacagtcccgagactgggatcccccaccccaacagtgattttggaaaaaaaaatgaaagttctgttcgtttatccattgcgatctggggagccccatctcgatatttccaatcctggctacttttcttagagaaaataagtcctttttttctggccttgctaatggcaacagaagaaagggcttctttgcgtggtcccctgctggtgggggtggtccccaggggccccctgcgcctgggcccccctsccacggccagcttcctgctgatgaacatgctgtttgtattgttttaggaaaccaggctgttttgtgaataaaacgaatgcatgtttgtgtcacgaarmaaaaaaaaaaaaaa

SEQ ID NO: 116 - DNA, 1060 bp, Homo sapiens
  misc_feature (299): n equals a,t,g, or c
  misc_feature (1060): n equals a,t,g, or c
gaaacacatacattggatatgggaagatggcggctgtgtcggtgtatgctccaccagttggaggcttctcttttgataactgccgcagaatgccgtcttggaagccgattttgcaaagaggggatacaagcttccaaaggyccggaaaactggcacgaccatcgctggggtggtctataaggatggcatagttcttggagcagatacaagagcaactgaagggatggttgttgctgacaagaactgttcaaaaatacacttcatatctcctaatatttattgttgtggtgctgggacanctgcagacacagacatgacaacccagctcatttcttccaacctggagctccactccctctccactggccgtcttcccagagttgtgacagccaatcggatgctgaagcagatgcttttcaggtatcaaggttacattggtgcagccctagttttagggggagtagatgttactggacctcacctctacagcatctatcctcatggatcaactgataagttgccttatgtcaccatgggttctggctccttggcagcaatggctgtatttgaagataagtttaggccagacatggaggaggaggaagccaagaatctggtgagcgaagccatcgcagctggcatcttcaacgacctgggctccggaagcaacattgacctctgcgtcatcagcaagaacaagctggattttctccgcccatacacagtgcccaacaagaaggggaccaggcttggccggtacaggtgtgagaaagggactactgcagtcctcactgagaaaatcactcctctggagattgaggtgctggaagaaacagtccaaacaatggacacttcctgaatggcatcagtgggtggctggccgcggttctggaaggtggtgagcattgaggcccagtaagacactcatgtggctagtgtttgccgaatgaaactcaactcaataaaaaacaaaaaccaaattgggcagctgaaaaaaaaaaaaaaaaaaaaaaaaaaaaaaaaaaaaaaaaaaaaaaaaaaaaaaaaaaaaaaaaaaaan

SEQ ID NO: 117 - DNA, 709 bp, Homo sapiens
  misc_feature (174): n equals a,t,g, or c
aattcggcacgagaacatccattctaaagggctactgtcccaaatcctgtgtgtccttttgacttgtctgatcacccaatggaagtggatacttgtaaagtctacaccactgtacttggcgttaaatcttgctgaattcgtggtaagctgttaccatgtctacattttgtagantgattttggtctgcagcaaaattcgatttcacttctcatacccctttccttccacttgaaatgcaatttagacagaggccctgtggtgaaagttgcaatattaagtttmcctttagaagatcccytcctcaaacctcagaacccctagcagtgttaccctwaaacaaaaatgagctcgagaaaaaagtagctcagttacagagaagcaaatcgagttatttccccacataaaaagtttccccagattctaagaattgcagtatcctgtaccctaaaatttttcaaggtgactcctgttgtcgtctgttgataactttaataaaggtcatttaaggacataagtttttaaagactcccaaagtgaaacttaaacattttcgggattatcgattgcatatatcagtttatgctgtgtgctgaattactatgccatgtgctattttagtgtttggggaaaatgaaaaataaaatttgttctttagcttaataaatatgtcttattttaaaaaaaaaaaaaaaaaactcgagactagct

SEQ ID NO: 118 - DNA, 2053 bp, Homo sapiens
  misc_feature (813): n equals a,t,g, or c
  misc_feature (2049): n equals a,t,g, or c
ctccttggcgcctgtccccacggcccccgcagcgtgaccacgatgctccccataccccacccattcccgatacaccttacttactgtgtgttggcccagccagagtgaggaaggagtttggccacattggagatggcggtactgagcagacatgcccccacgagtagcctgactccctggtgtgctcctggaaggaagatcttggggacccccccaccggagcacacckarggatcatctttgcccgtctcctggggaccccccaagaaatgtggagtcctcgggggccgtgcactgatgcggggagtgtgggaagtctggcggttggargggtgggtggggggcagtgggggctgggcggggggagttctggggtaggaagtggtcccgggagattttggatggaaaagtcaggaggattgacagcagacttgcagaattacatagagaaattaggaacccccaaatttcatgtcaattgatctattccccctctttgtttcttggggcatttttccttttttttttttttttgttttttttttacccctccttagctttatgcgctcagaaaccaaattaaaccccccccccatgtaacaggggggcagtgacaaaagcaagaacgcacgaagccagcctggagaccaccacgtcctgccccccgccatttatcgccctgattggattttgtttttcatctgtccctgttgcttgggttgagttgagggtggagcctcctggggggcactggccactgagcccccttggagaagtcagaggggagtggagaaggccactgtccggcctggnttctggggacagtggctggtccccagaagtcctgagggcggaggggggggttgggcagggtctcctcaggtgtcaggagggtgctcggaggccacaggagggggctcctggctggcctgaggctggccggaggggaaggggctagcaggtgtgtaaacagagggttccatcaggctggggcagggtggccgccttccgcacacttgaggaaccctcccctctccctcggtgacatcttgcccgcccctcagcaccctgccttgtctccaggaggtccgaagctctgtgggacctcttgggggcaaggtggggtgaggccggggagtagggaggtcaggcgggtctgagcccacagagcaggagagctgccaggtctgcccatcgaccaggttgcttgggccccggagcccacgggtctggtgatgccatagcagccaccaccgcggcgcctagggctgcggcagggactcggcctctgggaggtttacctcgcccccacttgtgcccccagctcagcccccctgcacgcagcccgactagcagtctagaggcctgaggcttctgggtcctggtgacggggctggcatgaccccgggggtcgtccatgccagtccgcctcagtcgcagagggtccctcggcaagcgccctgtgagtgggccattcggaacattggacagaagcccaaagagccaaattgtcacaattgtggaacccacattggcctgagatccaaaacgcttcgaggcaccccaaattacctgcccattcgtcaggacacccacccacccagtgttatattctgcctcgccggagtgggtgttcccgggggcacttgccgaccagccccttgcgtccccaggtttgcagctctcccctgggccactaaccatcctggcccgggctgcctgtctgacctccgtgcctagtcgtggctctccatcttgtctcctccccgtgtccccaatgtcttcagtggggggccccctcttgggtcccctcctctgccatcacctgaagacccccacgccaaacactgaatgtcacctgtgcctgccgcctcggtccacttgcggcccgtgtttgactcaactcagctcctttaacgctaatatttccggcaaaatcccatgcttgggttttgtctttaaccttgtaacgcttgcaatcccaataaagcattaaaagtcatraaaaaaaaaaaaaaaaaaaaaaaaaaaaaaaaaaaaggggggggnccgg

SEQ ID NO: 119 - DNA, 1824 bp, Homo sapiens
agttcctagcaagctgttcacaagattgcctgataagaatatggaagctgtatataaagtcaacatctttagaaactcaggatgacgataacataagactgaaggaaaatacttttaccatagaaaatgaaaagtgttaaaatagcatttgctgttactctggagacagtgctagccggtcatgaaaactgggtaaatgcagttcactggcaacctgtgttttacaaagatggtgtcctacagcagccagtgagattattatctgcttccatggataaaaccatgattctctgggctccagatgaagagtcaggagtttggctagaacaggttcgagtaggtgaagtaggtgggaatactttgggattttatgattgccagttcaatgaagatggctccatgatcattgctcatgctttccacggagcgttgcacctttggaaacagaatacagttaacccaagagagtggactccagagattgtcatttcaggacactttgatggtgtccaagacctagtctgggatccagaaggagaatttattatcactgttggtactgatcagacaactagactttttgctccatggaagagaaaagaccaatcacaggtgacttggcatgaaattgcaaggcctcagatacatgggtatgacctgaaatgtttggcaatgattaatcggtttcagtttgtatctggagcagatgaaaaagttcttcgggttttttctgcacctcggaattttgtggaaaatttttgtgccattacaggacaatcactgaatcatgtgctctgtaatcaagatagtgatcttccagaaggagccactgtccctgcattgggattatcaaataaagctgtctttcagggagatatagcttctcagccttctgatgaagaggagctgttaactagtactggttttgagtatcagcaggtggcctttcagccctccatacttactgagcctcccactgaggatcatcttctgcagaatactttgtggcctgaagttcaaaaactatatgggcacggttatgaaatattttgtgttacttgtaacagttcaaagactctgcttgcctcagcttgtaaggcagctaagaaagagcatgcagctatcattctttggaacactacatcttggaaacaggtgcagaatttagttttccacagtttgacagtcacgcagatggccttctcacctaatgagaagttcttactagctgtttccagagatcgaacctggtcattgtggaaaaagcaggatacaatctcacctgagttcgagccagtttttagtctttttgccttcaccaacaaaattacttctgtgcacagtagaattatttggtcttgtgattggagtcctgacagcaagtatttcttcactgggagtcgagacaaaaaggtggttgtctggggtgagtgtgactccactgatgactgtattgagcacaacattggcccctgctcctcagtcctggacgtgggtggggctgtgacagctgtcagcgtctgcccagtgctccacccttctcaacgatacgtggttgcagtaggattggagtgtggaaagatttgcttatatacctggaaaaagactgatcaagttccagaaataaatgactggacccactgtgtagaaacaagtcaaagccaaagtcatacactggctatcagaaaattatgctggaagaattgcagtggaaaaactgaacagaaggaagcagaaggtgctgagtggttacactttgcaagctgtggtgaagatcacactgtgaagatacacagagtcaataaatgtgcactgtaatggaaa

SEQ ID NO: 120 - DNA, 606 bp, Homo sapiens
  misc_feature (144): n equals a,t,g, or c
  misc_feature (155): n equals a,t,g, or c
  misc_feature (598): n equals a,t,g, or c
aggaagctgggggaccattttgcaccatgagtttgtgaaaaatctggattaaaaaattactcttccagtgttttctcatgcmaaatttyctyctarcatgtgataatgagtaaactaaaactatttycagcttttcctcaattnacattttggtngtatacttcagagtgatgttatctaagtttaagtagtttaagtatgttaaatgtggatcttttacaccacatcacagtgaacacactggggagatgtgcttttttggaaaactcaaaggtgctagctccctgattcaaagaaatatttctcatgtttgttcattctagtttatattttcatttaaaatcctttaggttaagtttaagctttttaaaagttagttaaaagaattgagacacaatactaatactgtaggaattggtgaggccttgacttaaaactttctttgtactgtgatttccttttgggtgtattttgctaagtgaaacttgttaaattttttgttaactaaatttttttcttaaaataaagactttttcacaawraaaaaaaaaaaaaaaaaaactcgagggggggcccgtacccaatcgcctgtgatgtntcgtatac

SEQ ID NO: 121 - DNA, 838 bp, Homo sapiens
gaatcccgggtcgacccacgcgtccgggaaagatcggcgcgcaccgcaggagcaacggttggtcctgcggctgtgatgtcggtgttgaggcccctggacaagctgcccggcctgaacacggccaccatcttgctggtgggcacggaggatgctcttctgcagcagctggcggactcgatgctcaaagaggactgcgcctccgagctgaaggtccacttggcaaagtccctccctttgccctccagtgtgaatcggccccgaattgacctgatcgtgtttgtggttaatcttcacagcaaatacagyctccagaacacagaggagtccctgcgccatgtggatgccagcttcttcttggggaargtgtgtttcctcgccacaggtggtggmrggctttagggccaccatggcgcarcgcctggtgcgcgtgctgcagatctgtgctggccacgtgcccggtgtctcagctctgaacctgctgtccctgctgagaagctctgagggcccctccctggaggacctgtgagggtggctkgcccctgggctgccccttctcatggcttcgtgctgactccataaacattctctgttgaggatgtccagtcagggcttgacaggcccaggctcagccccccgtggctgggaaggttccctgcagtgccagtgctgcagcagggagagctgggcagaagcagcgagggggcccagctggcgagactgtagccccctcccactcccacactcactcttgcagagcctgtgtctttaagcagctggcgtgttacatctccatttaaggtttcctttgaacaaaaggtctgtggctaaaaaaagttta

SEQ ID NO: 122 - DNA, 656 bp, Homo sapiens
  misc_feature (41): n equals a,t,g, or c
  misc_feature (218): n equals a,t,g, or c
ggcacgagcgctcttgctgcgacgcacggtcggaagcggancaaggtcgaggccgggttggcgccggagccggggccgcttggagctcgtgtggggtctccggtccagggcgcggcatgggcgtcctggccgcagcggcgcgctgcctggtccggggtgcggaccgaatgagcaagtggacgagcaagcggggcccgcgcagcttcaggggccgcaanggccggggcgccaagggcatcggcttcctcacctcgggctggaggttcgtgcagatcaaggagatggtcccggagttcgtcgtcccggatctgaccggcttcaagctcaagccctacgtgagctacctcgcccctgagagcgaggagacgcccctgacggccgcgcagctcttcagcgaagccgtggcgcctgccatcgaaaaggacttcaaggacggtaccttcgaccctgacaacctggaaaagtacggcttcgagcccacacaggagggaaagctcttccagctctaccccaggaacttcctgcgctagctgggcgggggaggggcggcctgccctcatctcatttctattaaacgcctttgccagctaaaaaaaaaaaaaaaaaaaaaaaaaaaaaaaaaaaaaaaaaaaaggggggggggcggacgcgtgggc

SEQ ID NO: 123 - DNA, 1386 bp, Homo sapiens
  misc_feature (8): n equals a,t,g, or c
  misc_feature (1283): n equals a,t,g, or c
aaccgggnaaaaggaaaccgtgttgtgtacgtaagattcaggaaacgaaaccaggagccgcgggtgttggcgcaaaggttactcccagacccttttccggctgacttctgagaaggttgcgcacagctgtgcccggcagtctagaggcgcagaagaggaagccatcgcctggccccggctctctggaccttgtctcgctcgggagcggaaacagcggcagccagagaactgttttaatcatggacaaacaaaactcacagatgaatgcttctcacccggaaacaaacttgccagttgggtatcctcctcagtatccaccgacagcattccaaggacctccaggatatagtggctaccctgggccccaggtcagctacccacccccaccagccggccattcaggtcctggcccagctggctttcctgtcccaaatcagccagtgtataatcagccagtatataatcagccagttggagctgcaggggtaccatggatgccagcgccacagcctccattaaactgtccacctggattagaatatttaagtcagatagatcagatactgattcatcagcaaattgaacttctggaagttttaacaggttttgaaactaataacaaatatgaaattaagaacagctttggacagagggtttactttgcagcggaagatactgattgctgtacccgaaattgctgtgggccatctagaccttttaccttgaggattattgataatatgggtcaagaagtcataactctggagagaccactaagatgtagcagctgttgttgtccctgctgccttcaggagatagaaatccaagctcctcctggtgtaccaataggttatgttattcagacttggcacccatgtctaccaaagtttacaattcaaaatgagaaaagagaggatgtactaaaaataagtggtccatgtgttgtgtgcagctgttgtggagatgttgattttgagattaaatctcttgatgaacagtgtgtggttggcaaaatttccaagcactggactggaattttgagagaggcatttacagacgctgataactttggaatccagttccctttagaccttgatgttaaaatgaaagctgtaatgattggtgcctgtttcctcattgacttcatgttttttgaaagcactggcagccrggaacaaaaatcaggagtgtggtagtggrttagtgaaagtctcctcaggaaatctgaagtctgtatattgattgagactatctaaactcataccygtatgrattaagcygtnaaggcctgtagctctggttgtatacttttgcytttcmaattawagtttakcttctgtataactgatttataaaggtttttgtacattttttaatactcattgg

SEQ ID NO: 124 - DNA, 845 bp, Homo sapiens
  misc_feature (823): n equals a,t,g, or c
  misc_feature (825): n equals a,t,g, or c
ggcagaggttcacacccggaagcaggggcccgaggcggagccggccgcgatgagcggggagccggggcagacgtccgtagcgccccctcccgaggaggtcgagccgggcagtggggtccgcatcgtggtggagtactgtgaaccctgcggcttcgaggcgacctacctggagctggccagtgctgtgaaggagcagtatccgggcatcgagatcgagtcgcgcctcgggggcacaggtgcctttgagatagagataaatggacagctggtgttctccaagctggagaatgggggctttccctatgagaaagatctcattgaggccatccgaagagccagtaatggagaaaccctagaaaagatcaccaacagccgtcctccctgcgtcatcctgtgactgcacaggactctgggttcctgctctgttctggggtccaaaccttggtctccctttggtcctgctgggagctccccctgcctctttcccctacttagctccttagcaaagagaccctggcctccactttgccctttgggtacaaagaaggaatagaagattccgtggccttgggggcaggagagagacactctccatgaacacttctccagccacctcatacccccttcccagggtaagtgcccacgaaagcccagtccactcttcgcctcggtaatacctgtctgatgccacagattttatttattctcccctaacccagggcaatgtcagctattggcagtaaagtggcgctacaaacactaaaaaaaaaaaaaaaaaaaaaaaaaaaaaaaaaaaaaaaaaaaaaaaaaaaaaaaaaaaatntngggggggggccccccccccc

SEQ ID NO: 125 - DNA, 1656 bp, Homo sapiens
ctcccactcctgcctcgcactccccttctccatccttgcccgccctccccccgagtcctcctcaccgcccggactctccactgttcaactcgagatgcagctctccactccagctcaatctgctgcagctggaggagctcccccgtgctgagggggctgctgttgcaggaggccctgggagcagtgccgggcccccacctcccartgcggaggctgctgagccagaggccagactggcggaggtcactgagtcctccaatcaggacgcactttccggctccagtgacctgctcgaacttctgctgcaagargactcgcgctccggcacaggctccgcagcctcgggctccttgggctctggcttgggctctgggtctggttcaggctcccatgaagggggcagcacctcagccagcatcactcgcagcagccagagcagccacacaagcaaatactttggcagcatcgactcttccgaggctgaggctggggctgctcggggcggggctgagcctggggaccaggtgattaagtacgtgctccaggatcccatttggctgctcatggccaatgctgaccagcgcgtcatgatgacctaccaggtgccctccagggacatgacctctgtgctgaagcaggatcgggagcggctccgagccatgcagaagcagcagcctcggttttctgaggaccagcggcgggaactgggtgctgtgcactcctgggtccggaagggccaactgcctcgggctcttgatgtgatggcctgtgtggactgtgggagcagcacccaagatcctggtcaccctgatgacccactcttctcagagctggatggactggggctggagcccatggaagagggtggaggcgagcagggcagcagcggtggcggcagtggtgagggagagggctgcraggaggcccaaggcggggccaaggcttcaagctctcaggacttggctatggaggaggaggaagaaggcaggagctcatccagtccagccttacctacagcaggaaactgcaccagctagactccattctgggaccatctccaggagtccatgagaggctttcttctcctatgtcccaattctcagaactcagatgtggctagaccaaccagtgggaaactgccccagcttctcccaccatagggggccggacccccatgcaccagcctaggatccaggggctgcctctggcctcttagggagcagagagcagaactccgcagcccagcccagaggagtgtcacctcccacctttggagaggaatccttccctcccctggacaaagttgctgacaagctgctgaagtggcctctccatattccagctgagcctgaatctgactcttgagggttggggctgcacttatttattgcggggagacagctctctctcccacctcctccccagatgggaggagagcctgaggcccaagcaggacccgggggttccagcccctagctgctctggagtgggggaggttggtggaccatggagtccctggtgctgcccctcaggtgggacccaggcgttctcagctgtaccctctgccgatggcatttgtgtttttgatatttgtgtctgttactacttttttaatacaaaaagataaaaacgcccaaaaaaaaaaaaaaaaaaacc

SEQ ID NO: 126 - DNA, 837 bp, Homo sapiens
tggacgttggccctgtttgctttttataaaccaaactctatctgaaatcccaacaaaaaaaatttaactccatatgtgttcctcttgttctaatcttgtcaaccagtgcaagtgaccgacaaaattccagttatttatttccaaaatgtttggaaacagtataatttgacaaagaaaaatgatacttctctttttttgctgttccaccaaatacaattcaaatgctttttgttttatttttttaccaattccaatttcaaaatgtctcaatggtgctataataaataaacttcaacactctttatgataacaacactgtgttatattctttgaatcctagcccatctgcagagcaatgactgtgctcaccagtaaaagataacctttctttctgaaatagtcaaatacgaaattagaaaagccctccctattttaactacctcaactggtcagaaacacagattgtattctatgagtcccagaagatgaaaaaaattttatacgttgataaaacttataaatttcattgattaatctcctggaagattggtttaaaaagaaaagtgtaatgcaagaatttaaagaaatatttttaaagccacaattattttaatattggatatcaactgcttgtaaaggtgctcctcttttttcttgtcattgctggtcaagattactaatatttgggaaggctttaaagacgcatgttatggtgctaatgtactttcacttttaaactctagatcagaattgttgacttgcattcagaacataaatgcacaaaatctgtacatgtctcccatcagaaagattcattggcatgccacaggggattct

SEQ ID NO: 127 - DNA, 1217 bp, Homo sapiens
  misc_feature (1168): n equals a,t,g, or c
  misc_feature (1169): n equals a,t,g, or c
gatcgcggaaaggggcacgggaagcggttggggtgctctgggaagtattatggggcctgggtacgccgaggctgcgggaccggrcctggctgacttaatcttcgttccccacacatttgtttccgcagttcgaagcccagttgggccgaccaggtggaggaggagggggaggacgacaaatgtgtcaccagcgagctcctcaaggggatccctctggccacaggtgacaccagcccagagccagagctactgccgggagctccactgccgcctcccaaggaggtcatcaacggaaacataaagacagtgacagagtacaagatagatgaggatggcaagaagttcaagattgtccgcaccttcaggattgagacccggaaggcttcaaaggctgtcgcaaggaggaagaactggaagaagttcgggaactcagagtttgacccccccggacccaatgtggccaccaccactgtcagtgacgatgtctctatgacgttcatcaccagcaaagaggacctgaactgccaggaggaggaggaccctatgaacaaactcaagggccagaagatcgtgtcctgccgcatctgcaagggcgaccactggaccacccgctgcccctacaaggatacgctggggcccatgcagaaggagctggccgagcagctgggcctgtctactggcgagaaggagaagctgccgggagagctagagccggtgcaggccacgcagaacaagacagggaagtatgtgccgccgagcctgcgcgacggggccagccgccgcggggagtccatgcagcccaaccgcagagccgacgacaacgccaccatccgtgtcaccaacttgtcagaggacacgcgtgagaccgacctgcaggagctcttccggcctttcggctccatctcccgcatctacctggctaaggacaagaccactggccaatccaagggctttgccttcatcagcttccaccgccgcgaggatgctgcgcgtgccattgccggggtgtccggctttggctacgaccacctcatcctcaacgtcgagtgggccaagccgtccaccaactaagccagctgccactgtgtactcggtccgggacccttggcgacagaagacagcctccgagagcgcgggctccaagggcaataaagcagctccactctcnnaaaaaaaaaaaaaaaaaaaagggcggccgctcgcgatctagaactagc

SEQ ID NO: 128 - DNA, 1349 bp, Homo sapiens
  misc_feature (57): n equals a,t,g, or c
  misc_feature (1133): n equals a,t,g, or c
tggacgcgtgggtggcggccggaggaggagtaggtgcgggtgaagatggcggcagcngaggccgcgaactgcatcatggaggtgtcctgtggccaggcggaaagcagtgagaagcccaacgctgaggacatgacatccaaagattactactttgactcctacgcacactttggcatccacgaggagatgctgaaggacgaggtgcgcaccctcacttaccgcaactccatgtttcataaccggcacctcttcaaggacaaggtggtgctggacgtcggctcgggcaccggcatcctctgcatgtttgctgccaaggccggggcccgcaaggtcatcgggatcgagtgttccagtatctctgattatgcggtgaagatcgtcaaagccaacaagttagaccacgtggtgaccatcatcaaggggaaggtggaggaggtggagctcccagtggagaaggtggacatcatcatcagcgagtggatgggctactgcctcttctacgagtccatgctcaacaccgtgctctatgcccgggacaagtggctggcgcccgatggcctcatcttcccagaccgggccacgctgtatgtgacggccatcgaggaccggcagtacaaagactacaagatccactggtgggagaacgtgtatggcttcgacatgtcttgcatcaaagatgtggccattaaggagcccctagtggatgtcgtggaccccaaacagctggtcaccaacgcctgcctcataaaggaggtggacatctataccgtcaaggtggaagacctgaccttcacctccccgttctgcctgcaagtgaagcggaatgactacgtgcacgccctggtggcctacttcaacatcgagttcacacgctgccacaagaggaccggcttctccaccagccccgagtccccgtacacgcactggaagcagacggtgttctacatggaggactacctgaccgtgaagacgggcgaggagatcttcggcaccatcggcatgcggcccaacgccaagaacaaccgggacctggacttcaccatcgacctggacttcaagggccagctgtgcgagctgtcctgctccaccgactaccggatgcgctgaggcccggctctcccgccctgcacgancccaggggctgagcgttcctaggcggtttcggggctcccccttcctctccctccctcccgcagaagggggttttaggggcctgggctggggggatggggagggcacatcgtgactgtgtttttcataacttatgtttttatatggttgcatttacgccaataaatcctgcagctgggaaaaaaaaaaaaaaaaaaaaaaaaaaaaaaaaaaaaaaa

SEQ ID NO: 129 - DNA, 2318 bp, Homo sapiens
tgcgcacggacgtgctcgagtttcctctgctctccgctctcgcccgctagctctcctcccttccgctcctgcttctctccgggtctcccgctccagctccagccccacccggccggtcccgcacggctccgggtagccatggaggaccccacgctctatattgtcgagcggccgcttcccgggtaccccgacgccgaggccccggagccttcctccgctggggctcaggcagcggaggagccgtcgggggccggctcagaagagctgatcaagtcggaccaggtgaacggcgtgctggtgctgagcctcctggacaaaatcatcggggccgtagaccagatccagctgactcaagcacagctggaggagcggcaggcggagatggagggcgcagtgcagagcatccagggcgagctgagcaagctgggcaaggcgcacgcaccacgagcaatacggtgagcaagctgctggagaaggtgcgcaaggtcagcgtcaacgtgaagaccgtgcgcggcagcctggagcgccaggcggggcagatcaagaagctggaggtcaacgaggccgagctgctkcggcgccgcaactttaaagtcatgatctaccaggatgaagtgaagctgccggccaaactgagcatcagcaaatcgctgaaagagtcggaggcgctgccagagaaggagggcgaggagctgggcgagggcgagcggcccaggaggacgcagcggcgctgsagctttcgtcggacgaggcggtggaggttgaggaggttattgaggagtcccgcgcagagcgtatcaagcgcrgrccctgcggcgcgtggacgacttcaagaaggccttctccaaggagaagatggagaagaccaaggtgcgtacycgcgagaacctggagaagacgcgcctcaagaccaaggaaaacctggagaagacgcggcacaccctggagaagcgcatgaacaagctgggcacgcgcctggtgcccgccgagcggcgcgagaaactgaagacgtcgcgggacaagttgcgcaaatccttcacgcccgaccacgtggtgtacgcgcgctccaagaccgcggtctacaaggtgccacccttcaccttccacgtcaagaagatccgcgagggccaggtggaagtgctcaaggccaccgagatggtggaggtgggcgccgacgacgacgagggcggcgcggagcgcggggaggccggcgacctgcggcgcgggagcagccccgacgtgcacgcgctgctggagatcaccgaggagtcggacgccgtgctggtggacaagagcgacagcrrctgagccgcccccgctgccacccaccccattcctcgctccttccgaacttcctctttcgcattctctctcggctcgagctggctgagatttttctaaattgaaaacacgcccccctccccacacctccaggaactccactcccagtcttagagctgttaggacccgatggggaggcagcccccgcagtggacagcccccgcttggacacagtccgagtggaatgggaagggaatggtcaatccctgtcctggttgtccaagtcgggatctcagaggaaattgcagtgattccacggttaggcccccctgggggggctgccttcccctcagcctctccccacaccacccacccagctgctgtcattccgctcactgagctcttcttcattctcaccctgatccctgggggactcaaagccaaaactgcccaaagaggaaagattgaatcctaaaggggatccttgcccccatgggaggccccctactagaaggacgtgaaagcagcttttgggggaaactgaggcagtggggaagacagagcagaatgagccctcaccctggctgggggtccagcacaggctgtatctgcagagggtcccagaggaacgctggagccaagagaagccctgggaaggaggggtggggaacgacatgcatgtgagggatggcacactgatgtgtttatgcacctgtacacaggagcgcatggccatggctttggaaaggagaatggaaaaatagaagaaggtcggccgggcttggtggcttawgcctgttaaccccagcactttgggaggccgaggtgggcggwtcacctgaagtcaggagttcgggaccagcctggcaaacaccccatctctactaagcgaaaacccatctctactaaaattacaaaaattagctgggcatggttgcgcatgcctgtaaatcccagctactttgggaggctgaggtggggagaattgcttgaacctggggaggtgggaggttgcagttgagccaaggttcgcgaca

SEQ ID NO: 130 - DNA, 2149 bp, Homo sapiens
  misc_feature (787): n equals a,t,g, or c
  misc_feature (819): n equals a,t,g, or c
  misc_feature (1518): n equals a,t,g, or c
  misc_feature (2116): n equals a,t,g, or c
  misc_feature (2147): n equals a,t,g, or c
aactctaatagatcatacaggaaacggtagctgcagtacggtcggaattcccgggtcgacccacgcgtccggagaaggcagacgcatcccgaactcgctggaggacaaggctcagctcttgccaggccaaattgagacatgtctgacacaagcgagagtggtgcaggtctaactcgcttccaggctgaagcttcagaaaaggacagtagctcgatgatgcagactctgttgacagtgacccagaatgtggaggtcccagagacaccgaagcctcaaaggcactggaggtctcagaggatgtgaaggtctcaaaagcctctggggtctcaaaggccacagaggtctcaaagaccccagaggctcgggaggcacctgccacccaggcctcrtctactactcagctgactgatacccaggttctggcagctgaaaacaagagtctagcagctgacaccaagaaacagaatgctgacccgcaggctgtgacaatgcctgccactgagaccaaaaaggtcagccatgtggctgatacaaaggtcaatacaaaggctcaggagactgaggctgcaccctctcaggccccagcagatgaacctgagcctgagagtgcagctgcccagtctcaggagaatcaggatactcggcccaaggtcaaagccaagaaagcccgaaaggtgaagcatctggatggggaagaggatggcagcagtgatcagagtcaggcttctggaaccacaggtggccgaaggtctcaaaggcyctaatggcctcaatggcccgcagcttncaaggggtcccatagccttttgggcccgcagnatcaaggactcggttggctgcttgggcccggagagccttgctctccctgagatcacctaaagcccgtagggcaaggctcgccgtagagctgccaagctccagtcatcccaagagcctgaagcaccaccacctcgggatgtggcccttttgcaagggagggcaaatgatttggtgaagtaccttttggctaaagaccagacgaagattcccatcaagcgctcggacatgctgaaggacatcatcaaagaatacactgatgtgtaccccgaaatcattgaacgagcaggctattcyttggagaaggtatttgggattcaattgaaggaaattgataagaatgaccacttgtacattcttctcagcaccttagagcccactgatgcaggcatactgggaacgactaaggactcacccaagctgggtctgctcatggtgcttcttagcatcatcttcatgaatggaaatcggtccagtgaggctgtcatctgggaggtgctgcgcaagttggggctgcgcctgggatacatcattcactctttggggacgtgaagaagctcatcactgatgagtttgtgaagcagaagtacctggactatgccagagtccccaatagcaatccccctgaatatgagttcttctggggcctgcgctcttactatgagaccagcaagatgaaagtcctcaagtttgcctgcaagntacaaaagaaggatcccaaggaatgggcagctcagtaccgagaggcgatggaagcrgatttgaaggctgcagctgaggctgcagctgaagccaaggctagggccgagattagagctcgaatgggcattgggctcggctcggagaatgctgccgggccctgcaactgggacgaagctgatatcggaccctgggccaaagcccggatccaggcgggagcagaagctaaagccaaagcccaagagagtggcagtgccagcactggtgccagtaccagtaccaataacagtgccagtgccagtgccagcaccagtggtggcttcagtgctggtgccagcctgaccgccactctcacatttgggctcttcgctggccttggtggagctggtgccagcaccagtggcagctctggtgcctgtggtttctcctacaagtgagattttagatattgttaatcctgccagtctttctcttcaagccagggtgcatcctcagaaacctactcaacacagcactctaggcagccactatcaatcaattgaagttgacactctgcattaaatctatttgccatttcaaaaaaaaaaaaaaaaaaactcgngggggggcccggtacccaattggcccatagngg

SEQ ID NO: 131 - DNA, 1020 bp, Homo sapiens
  misc_feature (11): n equals a,t,g, or c
  misc_feature (1019): n equals a,t,g, or c
ctcgtgcgtanaaggcagcgccccggagagctcttgcgcgtcttgttcttgcctggtgtcggtggttagtttctgcgacttgtgttgggactgctgataggaagatgtcttcaggaaatgctaaaattgggcaccctgcccccaacttcaaagccacagctgttatgccagatggtcagtttaaagatatcagcctgtctgactacaaaggaaaatatgttgtgttcttcttttaccctcttgacttcacctttgtgtgccccacggagatcattgctttcagtgatagggcagaagaatttaagaaactcaactgccaagtgattggtgcttctgtggattctcacttctgtcatctagcatgggtcaatacacctaagaaacaaggaggactgggacccatgaacattcctttggtatcagacccgaagcgcaccattgctcaggattatggggtcttaaaggctgatgaaggcatctcgttcaggggcctttttatcattgatgataagggtattcttcggcagatcactgtaaatgacctccctgttggccgctctgtggatgagactttgagactagttcaggccttccagttcactgacaaacatggggaagtgtgcccagctggctggaaacctggcagtgataccatcaagcctgatgtccaaaagagcaaagaatatttctccaagcagaagtgagcgctgggctgttttagtgccaggctgcggtgggcagccatgagaacaaaacctcttctgtattttttttttccattagtaaaacacaagacttcagattcagccgaattgtggtgtcttacaaggcaggcctttcctacagggggtggagagaccagcctttcttcctttggtaggaatggcctgagttggcgttgtgggcaggctactggtttgtatgatgtattagtagagcaacccattaatcttttgtagtttgtattaaacttgaactgagaaaaaaaaaaaaaaaaaaaaaaccccggggggggcccng

SEQ ID NO: 132 - DNA, 2319 bp, Homo sapiens
  misc_feature (10): n equals a,t,g, or c
  misc_feature (2246): n equals a,t,g, or c
acggctcggnattcccgggtcgacccacgcgtccgctacctttgaaaggtcagtgcctgcttgggggtgggggcgggccagcactcactgtttgcttccccaggccagctggaggtgatcttgggaccggcggctgatgcaggatgacaaccggggcctaggccaagggctcaaggacaacaagagaacctgcaaccgtttccgcctcctgctagagcggcgaaccrtgggcagtgaggtccaagatagccactctaccagctacccatccctcctcagccacctgacctccatgtacctgaacgccccggcgctcgctctgcctgtagccaggatgcagctcccaggccctggtctgcgctcatttcatcctctggcttcctcactgccctgtgacttccacctgctcaacctacgtacgctccaggctgaggaggacaccctaccctcggcggagaccgcactcatcttacaccgcaaggttttgactgcggcctggaggcaagaacttgggcttcaactgcaccacaagccaaggcaaggtagccctgggcagccttttccatggcctggatgtggtattccttcagccaacctccttgacgttactgtaccctctggcctccccgtccaacagcactgacgtctatttggagcccatggagattgctacctttcgcctccgcttgggttagggcttcttgtggcctgaagagaaagttcattcacagagactgcctcttaacatgaagatcattggacaagccacacgggtatcccatcccgatctgcctcccagaactgtgacacactgggctctgccytcattttctgtttattgctgctgctgtgttttcggcgcaacccacaaacccagtgatgggtaaatagggcagacgccatgagatcagggagagaaggcccttggtcagagtgggcagtgccaggctctgctttgggttgtgagtggacacccaactgggcacaggctcaggcacccatcctttttccaaacagggatatagaagtggtggaagcagacagaagaggtaagggaggctaagtgggtaacagcccagcatcagggtcactgtggcaacagcaggctctaggggaatcctgtggttatgtagagactccatgtcctggtgtgatgagcaggatcagagtgactctgggaggacaggggtggggacccagagttagcagtggggatggagcagtagaaggaatcactgtttctcctaggagtctgaaggcctcgctgctttctgtgatggctttgcagtaagtgccgcctggcctgcatgcattggctaacaggctgcagaatggcaggaaggactcgctagagattgtcatggccagagatcataggtcacttcaggtagcaagacccctggcaaactgggcacttggcctatgtactgatttgtgggatggtggcaggggtgtggggtccttcaccctgcctgaattctctttggcttctgtgctctgtatgctgctgtccccaagrgctctttcttattatggcagggagtggggattggtcctactttctttctctggaaaggaaagcctccaagactccatgtgcttgggcagcttgagaaggcgttcagcaccacgcctagcaggcagaccttgaagcctcacctttagtctatctgcagaggtattcagttcctggcacaggggactaggggcatgtagagtatatgaggaggcagtatggctgtgcaggagccttcatttcagcttcaattaatagggaagaatttatgatagctctatagatgctgaaaaggtatttcgtaagatttaaaatccatcccttattaaaactcttagtaaattaagtctggaaagaaacaccctaatctagataaaggtctgtttcagaaaccaacagtgatggcattctaaagagtcagacgccacaggcattcccattaaagtcagaaactagccaagggcaagctattattcagcagtgtcccggcactactaacccctgcaacaagccagatgaggaacataaggaagaattataattgtcattatttgtagacaataaaactgcctacctgtaaaacctaagaatcaactgaagacctgttaagagtattctgtaagtcaacccaatgatacacatcatgttcctgtccacatactggttttccccaaatcagctgataaattcagtgtaattccaatgagatgaaactttggaattgacagtnctaaagtgcattgggagagtgaatgtgtgagaacactaagaccactctgaacgatgataatgagtttgggggt

SEQ ID NO: 133 - DNA, 1373 bp, Homo sapiens
  misc_feature (403): n equals a,t,g, or c
cgcgaccggaagtccgtcactctcgcgaggccccagagagcaggcgctgggcagtgtggaggtcgttggagtcacttccgcgtcaccagctcctgtgcctgccagtcggtgcccctcccgctccagccatgctctccgccctcgcccggcctgccagcgctgctctccgccgcagcttcagcacctcggcccagaacaatgctaaagtagctgtgctaggggcctctggaggcatcgggcagccactttcacttctcctgaagaacagccccttggtgagccgcctgaccctctatgatatcgcgcacacacccggagtggccgcagatctgagccacatcgagaccaaagccgctgtgaaaggctacctcggacctgaacagctgcctgactgcctgaaagnttgtgatgtggtagttattccggctggagtccccagaaagccaggcatgacccgggacgacctgttcaacaccaatgccacgattgtggccaccctgaccgctgcctgtgcccagcactgcccggaagccatgatctgcgtcattgccaatccggttaattccaccatccccatcacagcagaagttttcaagaagcatggagtgtacaaccccaacaaaatcttcggcgtgacgaccctggacatcgtcagagccaacacctttgttgcagagctgaagggtttggatccagctcgagtcaacgtccctgtcattggtggccatgctgggaagaccatcatccccctgatctctcagtgcacccccaaggtggactttccccaggaccagctgacagcactcactgggcggatccaggaggccggcacggaggtggtcaaggctaaagccggagcaggctctgccaccctctccatggcgtatgccggcgcccgctttgtcttctcccttgtggatgcaatgaatggaaaggaaggtgttgtggaatgttccttcgttaagtcacaggaaacggaatgtacctacttctccacaccgctgctgcttgggaaaaagggcatcgagaagaacctgggcatcggcaaagtctcctcttttgaggagaagatgatctcggatgccatccccgagctgaaggcctccatcaagaagggggaagatttcgtgaagaccctgaagtgagccgctgtgacgggtggccagtttccttaatttatgaaggcatcatgtcactgcaaagccgttgcagataaactttgtattttaatttgctttggtgatgattactgtattgacatcatcatgccttccaaattgtgggtggctctgtgggcgcatcaataaaagccgtccttgattttatttttcaaaaaaaaaaaaaaaaaaaaaaaaaaaaaaaaaaaaaaaaaa

SEQ ID NO: 134 - DNA, 1657 bp, Homo sapiens
ggaacaagtgcctgtagtgtgtttggatctgtaccctacgactgattatacggtgaatgtgaccctgctgagatctcctaagcggcactcagtcaaataacaatagcaactcccccagcagtaaaacagaccatcagtaacatttcaggatttaatgaaacctgcttgagatggagaagcatcaagacagctgatatggaggagatgtatttattccacatttggggccagagatggtatcagaaggaatttgcccaggaaatgacctttaatatcagtagcagcagccgagatcccgaggtgtgcttggacctacgtccgggtaccaactacaatgtcagtctccgggctctgtcttcggaacttcctgtggtcatctccctgacaacccagataacagagcctcccctcccggaagtagaattttttacggtgcacagaggacctctaccacgcctcagactgaggaaagccaaggagaaaaatggaccaatcagttcatatcaggtgttagtgcttcccctggccctccaaagcacattttcttgtgattctgaaggcgcttcctccttctttagcaacgcctctgatgctgatggatacgtggctgcagaactactggccaaagatgttccagatgatgccatggagatacctataggagacaggctgtactatggggaatattataatgcacccttgaaaagagggagtgattactgcattatattacgaatcacaagtgaatggaataaggtgagaagacactcctgtgcagtttgggctcaggtgaaagattcgtcactcatgctgctgcagatggcgggtgttggactgggttccctggctgttgtgatcattctcacattcctctccttctcagcggtgtgatggcagatggacactgagtggggaggatgcactgctgctgggcaggtgttctggcagcttctcaggtgcccgcacagaggctccgtgtgacttccgtccagggagcatgtgggcctgcaactttctccattcccagctgggccccattcctggatttaagatggtggctatccctgaggagtcaccataaggagaaaactcaggaattctgagtcttccctgctacaggaccagttctgtgcaatgaacttgagactcctgatgtacactgtgatattgaccgaagstacatacagatctgtgaatcttggctgggacttcctctgagtgatgcctgagggtcagctcctctagacattgactgcaagagaatctctgcaacctcctatataaaagcatttctgttaattcattcagaatccattctttacaatatgcagtgagatgggcttaagtttgggctagagtttgactttatgaaggaggtcattgaaaaagagaacagtgacgtaggcaaatgtttcaagcactttagaaacagtacttttcctataattagttgatatactaatgagaaaatatactagcctgccatgccaataagtttcctgctgtgtctgttaggcagcattgctttgatgcaatttctattgtcctatatattcaaaagtaatgtctacattccagtaaaaatatcccgtaattaaaaaaaaaaaaaaaaaaaaaaaaaaaaaaaaaaaaaaaaaaaaaaaaaaaaagggcggcc

SEQ ID NO: 135 - DNA, 2360 bp, Homo sapiens
  misc_feature (1517): n equals a,t,g, or c
  misc_feature (2330): n equals a,t,g, or c
  misc_feature (2353): n equals a,t,g, or c
ggcacgagcgcagttgcgtgaggggtttgtrctatcctcggtgctgtggtgcagagctagttcctctccagctcagccgcgtaggtttggacatatttgactcttttccccccaggttgaattgaccaaagcaatggtgatggagaagcctagtcccctgctggtcgggcgggaatttgtgagacagtattacacactgctgaaccaggccccagacatgctgcatagattttatggaaagaactcttcttatgtccatgggggattggattcaaatggaaagccagcagatgcagtctacggacagaaagaaatccacaggaaagtgatgtcacaaaacttcaccaactgccacaccaagattcgccatgttgatgctcatgccacgctaaatgatggtgtggtagtccaggtgatggggcttctctctaacaacaaccaggctttgaggagattcatgcaaacgtttgtccttgctcctgaggggtctgttgcaaataaattctatgttcacaatgatatcttcagataccaagatgaggtctttggtgggtttgtcactgagcctcaggaggagtctgaagaagaagtagaggaacctgaagaaagacagcaaacacctgaggtggtacctgatgattctggaactttctatgatcaggcagttgtcagtaatgacatggaagaacatttagaggagcctgttgctgaaccagagcctgatcctgaaccagaaccagaacaagaacctgtatctgaaatccaagaggaaaagcctgagccagtattagaagaaactgcccctgaggatgctcagaagagttcttctccagcacctgcagacatagctcagacagtacaggaagacttgaggacattttcttgggcatctgtgaccagtaagaatcttccacccagtggagctgttccagttactgggataccacctcatgttgttaaagtaccagcttcacagccccgtccagagtctaagcctgaatctcagattccaccacaaagacctcagcgggatcaaagagtgcgagaacaacgaataaatattcctccccaaaggggacccagaccaatccgtgaggctggtgagcaaggtgacattgaaccccgaagaatggtgagacaccctgacagtcaccaactcttcattggcaacctgcctcatgaagtggacaaatcagagcttaaagatttctttcaaagttatggaaacgtggtggagttgcgcattaacagtggtgggaaattacccaattttggttttgttgtgtttgatgattctgagcctgttcagaaagtccttagcaacaggcccatcatgttcagaggtgaggtccgtctgaatgtcgaagagaagaagactcgagctgccagggaaggcgaccgacgagataatcgccttcggggacctggaggccctcgaggtgggctgggtggtggaatgagaggccctccccgtggaggcatggtgcagaaaccaggatttggagtgggaarggggnttgcgccacggcagtgaatcttcatggatcttcatgcagccatacaaaccctggttccaacagaatggtgaattttcgacagcctttggtatcttggagtatgaccccagtctgttataaactgcttaagtttgtataattttactttttttgtgtgttaatggtgtgtgctccctctccctctcttccctttcctgacctttagtctttcacttccaattttgtggaatgatattttaggaataacggacttttaaagaagcaaaaaaaaagactgaatttccttgcttactttgcatatacagactggatttttttttttttttacagccatttccccaaaggaatgtcttgcatattactgacatttggtatgtttcattcattggaatatttcttattttctacgtgtttgaaaagcctgtaagaaatacaggatttgataatattttgaaggcaggaaaaacccaaattgtttcttctttgagagtcatgactaccttctggtgtggagaaattgccattggaaaatttgacaattttgattctcactggtatgtttaaaaactgaataaaaggaatagaatttttttttgataaaggatcacaaaacaattctaaaacctaactgtttttaccattgaaatttaaattgtgataataggttttaaatgtctagaatgcaactgataggcttttcttgaactgttagtttttttgaagtagttttttccakgtttaatttgtatttggttaaaaaaacmaaaaggccaaaaattccccaaaaccccggttaaccaccagrgscaaacngttgtggccttcccaattaaccntgggatt

SEQ ID NO: 136 - DNA, 1042 bp, Homo sapiens
gccggtggctgctgtctctgggcgggccgtgggaggctcccgaggtgggggccggggcgggatggctgcagcggcggccggggccgggagcgggccctgggcggcccaggagaagcagttcccgccggcgctgctgagtttcttcatctacaacccgcgcttcgggccgcgcgaaggacaggaggaaaataagattttattttatcatccaaatgaggtagaaaagaatgagaagattagaaatgtcggattgtgtgaagctattgtacagtttacaaggacatttagcccatcaaaacctgcaaaatctttacatacacagaagaacagacagttcttcaatgaaccagaagaaaatttctggatggtcatggttgttcggartcctataattgaaaaacagagtaaagatggaaaaccagttattgaatatcaagaggaggagttgttggacaaggtttatagctcggtgctgcggcagtgctacagcatgtacaagctttttaatggtacatttctgaaagccatggaagacggaggcgtcaagcttctgaaagaaagattagagaaattcttccatcggtatttgcaaacgctacatttgcagtcatgtgacctacttgacatttttggtggaatcagcttcttcccgttggataaaatgacttatttgaaaatccagtcctttattaatagaatggaggaaagcctgaatatagtcaaatacactgcttttctctataacgatcagctcatctggagtggattagaacaagatgacatgagaattttatacaaataccttaccacctcccttttyccaaggcacatcgaacctgagttagcaggaagggattctccaataagagcagaaatgccaggaaatcttcaacactatggaagatttcttaccggacccttgaacctcaatgatccagatgcaaaatgcagattccccaaaatttttgtaaatacagwtgacacttatgaagagctccatttaatcgkttataaggyctgagaaagaaccccagtttaagtt

SEQ ID NO: 137 - DNA, 1037 bp, Homo sapiens
ggcaccgggagcggcgggttggtctacgctgtgcgcggcggacgtcggaggcagcggggagcggagcggggccgccggggcctctccagggccgcagcggcagcagttgggccccccgccccggccggcggaccgaagaacgcaggaagggggccggggggacccgcccccggccggccgcagccatgaactccaacgtggagaacctacccccgcacatcatccgcctggtgtacaaggaggtgacgacactgaccgcagacccacccgatggcatcaaggtctttcccaacgaggaggacctcaccgacctccaggtcaccatcgagggccctgaggggaccccatatgctggaggtctgttccgcatgaaactcctgctggggaaggacttccctgcctccccacccaagggctacttcctgaccaagatcttccacccgaacgtgggcgccaatggcgagatctgcgtcaacgtgctcaagagggactggacggctgagctgggcatccgacacgtactgctgaccatcaagtgcctgctgatccaccctaaccccgagtctgcactcaacgaggaggcgggccgcctgctcttggagaactacgaggagtatgcrgctcgggcccgtctgctcacagagatccacgggggcgccggcgggcccagcggcagggccgaagccggtcgggccctggccagtggcactgaagcttcctccaccgaccctggggccccagggggcccgggaggggctgagggtcccatggccaagaagcatgctggcgagcgcgataagaagctggcggccaagaaaaagacggacaagaagcgggcgctgcggcggctgtagtgggctctcttcctccttccaccgtgaccccaacctctcctgtcccctccctccaactctgtctctaagttatttaaattatggctggggtcggggagggtacagggggcactgggacctggatttgtttttctaaataaagttggaaaagcaaaaaaaaaaaaaaaaaaaaaaaaaaaaaaa

SEQ ID NO: 138 - DNA, 1490 bp, Homo sapiens
  misc_feature (1225): n equals a,t,g, or c
  misc_feature (1239): n equals a,t,g, or c
  misc_feature (1348): n equals a,t,g, or c
  misc_feature (1452): n equals a,t,g, or c
  misc_feature (1487): n equals a,t,g, or c
cggcacgaggtggattcttgtccatagtgcatctgctttaagaattaacgaaagcagtgtcaagacagtaaggattcaaaccatttgccaaaaatgagtctaagtgcatttactctcttcctggcattgattggtggtaccagtggccagtactatgattatgattttcccctatcaatttatgggcaatcatcaccaaactgtgcaccagaatgtaactgccctgaaagctacccaagtgccatgtactgtgatgagctgaaattgaaaagtgtaccaatggtgcctcctggaatcaagtatctttaccttaggaataaccagattgaccatattgatgaaaaggcctttgagaatgtaactgatctgcagtggctcattctagatcacaaccttctagaaaactccaagataaaagggagagttttctctaaattgaaacaactgaagaagctgcatataaaccacaacaacctgacagagtctgtgggcccacttcccaaatctctggaggatctgcagcttactcataacaagatcacaaagctgggctcttttgaaggattggtaaacctgaccttcatccatctccagcacaatcggctgaaagaggatgctgtttcagctgcttttaaaggtcttaaatcactcgaataccttgacttgagcttcaatcagatagccagactgccttctggtctccctgtctctcttctaactctctacttagacaacaataagatcagcaacatccctgatgagtatttcaagcgttttaatgcattgcagtatctgcgtttatctcacaacgaactggctgatagtggaatacctggaaattctttcaatgtgtcatccctggttgagctggatctgtcctataacaagcttaaaaacataccaactgtcaatgaaaaccttgaaaactattacctggaggtcaatcaacttgagaagtttgacataaagagcttctgcaagatcctggggccattatcctactccaagatcaagcatttgcgtttggatggcaatcgcatctcaraaaccagtcttccaccggatatgtatgaatgtctacgtgktgctaacgaagtcactcttaattaatatctgtatcctggaacaatattttatggktatgkttttctgtgkgtcagttttcatagtatccatawtttawtactgkktattacttccatgaattttaaaatctgagggaaangtttgtaaacattnatttttttaaagaaaagagaaaggcaggcctattcatcacaagaacacacacatatwcacgaatagacatcaaactcatgctttatttgtaaatttagtgtttttttanttctacgtcaaagatgtgcaaaaccttttacggttgcaggaaacagccagttttaaaatccttaaacttaagttcctcaagctggataaaacataggagtaccnctgcacaatatctgaacatcaatgtcggtaaaatnggg

SEQ ID NO: 139 - DNA, 1684 bp, Homo sapiens
  misc_feature (93): n equals a,t,g, or c
  misc_feature (201): n equals a,t,g, or c
  misc_feature (1657): n equals a,t,g, or c
  misc_feature (1659): n equals a,t,g, or c
  misc_feature (1682): n equals a,t,g, or c
tcgacccacgcgtccggccggctgagccacagcagggtcgccgcggggtcccggggccgtgctcccctgcccctccgggagcgcgcggggcgnggcggggcggggcgggaccaggcgggcgagctgggccctcgcccctccctcgggcggtcacctgggcacgggcgctgcaggtgtcggggcctcaaccttgcggaccgnacagccatcgatcctcgggtggcctcgaggtggtggcagggccgccccctgcagtccggagacgaacgcacggaccgggcctccggagcargttcggytggaargaamcgctctcgsttcgtcctacacttgcgcaaatgtctccgagcttactcacatagcatattggtatatcaaaatgaaatgcaaggaaccaaaaataacataattgaaggcagtaaaagtgaaattaaataggaagatcatcagtcaaggaagacccactggagaggacagaaaatgaagcagtgttttatcatgtgtatttcagcaggtcttcttgaaatttaactaaaaatatgactgctctctcttcagagaactgctcttttcagtaccagttacgtcaaacaaaccagcccctagatgttaactatctgctattcttgatcatacttgggaaaatattattaaatatccttacactaggaatgagaagaaaaaacacctgtcaaaattttatggaatatttttgcatttcactagcattcgttgatcttttacttttggtaaacatttccattatattgtatttcagggattttgtacttttaagcattaggttcactaaataccacatctgcctatttactcaaattatttcctttacttatggctttttgcattatccagttttcctgacagcttgtatagattattgcctgaatttctctaaaacaaccaagctttcatttaagtgtcaaaaattattttatttctttacagtaattttaatttggatttcagtccttgcttatgttttgggagacccagccatctaccaaagcctgaaggcacagaatgcttattctcgtcactgtcctttctatgtcagcattcagagttactggctgtcatttttcatggtgatgattttatttgtagctttcataacctgttgggaagaagttactactttggtacaggctatcaggataacttcctatatgaatgaaactatcttatattttcctttttcatcccactccagttatactgtgagatctaaaaaaatattcttatccaagctcattgtctgttttctcagtacctggttaccatttgtactacttcaggtaatcattgttttacttaaagttcagattccagcatatattgagatgaatattccctggttatactttgtcaatagttttctcattgctacagtgtattggtttaattgtcacaagcttaatttaaaagacattggattacctttggatccatttgtcaactggaagtgctgcttcattccacttacaattcctaatcttgagcaaattgaaaagcctatatcaataatgatttgktaatattattaattaaaagttacagctgtcataagatcataattttatgaacagaaagaactcaggacatattaaaaaataaactgractaaaacaaaaaaaancnaaaaaaaaaaaaaaagggcggcnac

SEQ ID NO: 140 - DNA, 427 bp, Homo sapiens
  misc_feature (395): n equals a,t,g, or c
  misc_feature (417): n equals a,t,g, or c
ggacttcctcccagcacattcctgcactctgccgtgtccacactgccccacagacccagtcctccaagcctgctgccagctccctgcaagcccctcaggttgggccttgccacggtgccagcaggcagccctgggctgggggtaggggactccctacaggcacgcagccctgagacctcagagggccaccccttgagggtggccaggcccccagtggccaacctgagtgctgcctctgccaccagccctgctggcccctggttccgctggccccccagatgcctggctgagacacgccatggcccttcagctggcccacacytyttcccggsccctggaakttggcaytgcagcagacagytccytgggcaccagrcagytaacaggacacagcngccagcccaaacagcagcgggnatgggggcag

SEQ ID NO: 141 - DNA, 889 bp, Homo sapiens
  misc_feature (60): n equals a,t,g, or c
  misc_feature (698): n equals a,t,g, or c
  misc_feature (889): n equals a,t,g, or c
ggcacgaggttgacgtcctgtagcatttgctgttctagaaagtacagagacacgtagaanagatgggaggatctagaaggaggctgtctcctgtgtagtgtatatttatctgtaagtgagccgttggggaaggattgaatacagagacgctgtctgcttgctgccttaagacagctagctgaattgctgattaacttttaaaatacccagcttggtttatttttcttagaatctgttgctaagactggggacgctgttttcttttacaaagggaaatctaagttaatttcaaggcattcgaaatggggaaagactattattgcattttgggaattgagaaaggagcttcagatgaagatattaaaaaggcttaccgaaaacaagccctcaaatttcatccggacaagaacaaatctcctcaggcagaggaaaaatttaaagaggtcgcagaagcttatgaagtattgagtgatcctaaaaagagagaaatatatgrtcagtttggggaggaagggttgaaaggaggagcaggaggtactgatggacaaggaggtaccttccggtacacctttcatggcgatcctcatgctacatttgctgcatttttcggagggtccaacccctttgaaattttctttggaagacgaatgggtggtggtagagattctgaagaaatggaaatagrtggtgatcctttnagtgcctttggtttcagcatgaatggatatccaagagacaggaattctgtggggccatcccgcctcaaacaagatcctccagttattcatgaacttagagtatcacttgaagagatatatagtggttgtaccaaacgggatgaaagatttctcgaaaaaggttaaaacgctgatggtaggagttacagttn

SEQ ID NO: 142 - DNA, 1505 bp, Homo sapiens
  misc_feature (1493): n equals a,t,g, or c
  misc_feature (1499): n equals a,t,g, or c
  misc_feature (1500): n equals a,t,g, or c
agtgagggaagcgatgggcgcgggaatggccggcccacgggtcgcaggagacgggacgccagcttttggctccgttccgctggctccttcgtcagtactgacacctcgggcttgtagagcacttcacgcagcaaaagcgccccccgtctatatcatatcgcctctcggtcctcctaaaagtcgtatgagatggagctggaggaggggaaggcaggcagcggactccgccaatattatctgtccaagattgaagaactccagctgattgtgaatgataagagccaaaacctccggaggctgcaggcacagaggaacgaactaaatgctaaagttcgcctattgcgggaggagctacagctgctgcaggagcagggctcctatgtgggggaagtagtccgggccatggataagaagaaagtgttggtcaaggtacatcctgaaggtaaatttgttgtagacgtggacaaaaacattgacatcaatgatgtgacacccaattgccgggtggctctaaggaatgacagctacactctgcacaagatcctgcccaacaaggtagacccattagtgtcactgatgatggtggagaaagtaccagattcaacttatgagatgattggtggactggacaaacagatcaaggagatcaaagaagtgatcgagctgcctgttaagcatcctgagctcttcgaagcactgggcattgctcagcccaagggagtgctgctgtatggacctccaggcactgggaagacactgttggcccgggctgtggctcatcatacggactgtacctttattcgtgtctctggctctgaattggtacagaaattcataggggaaggggcaagaatggtgagggagctgtttgtcatggcacgggaacatgctccatctatcatcttcatggacgaaatcgactccatcggctcctcgcggctggaggggggttctggaggggacagtgaagtgcagcgcacgatgctggagttgctcaaccagctygacggctttgaggccaccaagaacatcaaggttatcatggctactaataggattgatatcctggactcggcactgcttcgcccagggcgcattgacagaaaaattgaattcccaccccccaatgaggaggcccggctggacattttgaagattcattctcggaagatgaacctgacccgggggatcaacctgagaaaaattgctgagctcatgccaggagcatcaggggctgaagtgaagggcgtgtgcacagaagctggcatgtatgccctgcgagaacggcgagtccatgtcactcaggaggactttgagatggcagtagccaaggtcatgcagaaggacagtgagaaaaacatgtccatcaagaaattatggaagtgagtggacagcctttgtgtgtatctctccaataaagctctgtgggccaagtcaaaaaaaaaaaaaaaaaaaaaaaaaaaaaaaaaaaaaaaaaaaaaaaaaaaaaaaangggggnnccccc

SEQ ID NO: 143 - DNA, 1235 bp, Homo sapiens
cggacggtgggtagcggcggcggcgctggcaccccggccccggcgggccccggcggacggcgggcaaaggtcccaggaaggtggcgtcagcatctgcagccgcgtcgacgttgtcggagcctccgcggaggacccaggagagccggactaggaccagggccctgggcctccccacactccccatggagaagctggcggcctctacagagccccaagggcctcggccggtcctgggccgtgagagtgtccaggtgcccgatgaccaagactttcgcagcttccggtcagagtgtgaggctgaggtgggctggaacctgacctatagcagggctggggtgtctgtctgggtgcaggctgtggagatggatcggacgctgcacaagatcaagtgccggatggagtgctgtgatgtgccagccgagacactctacgacgtcctacacgacattgagtaccgcaagaaatgggacagcaacgtcattgagacttttgacatcgcccgcttgacagtcaacgctgacgtgggctattactcctggaggtgtcccaagcccctgaagaaccgtgatgtcatcaccctccgctcctggctccccatgggcgctgattacatcattatgaactactcagtcaaacatcccaaatacccacctcggaaagacttggtccgagctgtgtccatccagacgggctacctcatccagagcacagggcccaagagctgcgtcatcacctacctggcccaggtggaccccaaaggctccttacccaagtgggtggtgaataaatcttctcagttcctggctcccaaggccatgaagaagatgtacaaggcgtgcctcaagtaccccgagtggaaacagaagcacctgcctcacttcaagccgtggctgcacccggagcagagcccgttgccgagcctggcgctgtcggagctgtcggtgcagcatgcggactcactggagaacatcgacgagagcgcggtggccgagagcagagaggagcggatgggcggcgcgggcggcgagggcagcgacgacgacacctcgctcacctgagcgycgcaccgcttcagggacggagacaggaccgggcgagccctggggcggcggccgctcctgcactttctcccctcccccacccggcacctggtggcaccgggccaggcccaggcgggtgctgcagcctggctggacagagccccaataaacgatcccacagcctcaaaaaaaaaa

SEQ ID NO: 144 - DNA, 1420 bp, Homo sapiens
  misc_feature (1385): n equals a,t,g, or c
  misc_feature (1396): n equals a,t,g, or c
  misc_feature (1400): n equals a,t,g, or c
  misc_feature (1410): n equals a,t,g, or c
gcaagaacggagctgactgaggaaccaactggagggtcttcactctctccttccccagtgtacaaaaccagttttctgcaacattcaggagccaaatgaggaaaaagaatcaagaatctgactcacagcccatctgatctgttcaaagctgtcttttccacctgctgaaattcattaaatcactggaggcatgcataatgaatggagaatgagtgaacttccaatgcaacttggattcacaaacccattatcatagccaatatgcagattttaaacagcatttcacatttcatttgaccatgtcttctttttcgcatcgcctgctgcagaattccctactagaatgtgaaacaacgaacaaaccacagaacttagagtgtgctggttagtcacataacttagtagcaggattgtgtatccaggcacaaaggtgtctttgctaatgttctcttgctacctgccctgcttcaaacgctaaatggtatgggtctttctttgttgccagccatattctacaaataagacttttcaatatagttatgagtaatataattttatgtacatataatgttagaatattgtacagaatcttggtttctacgatgcgcttttcttgtttcaaaaagaggaaaatgcttgatttttgttgatgatacttttgttactgtccttaattttccatagtttggtttcttaattgtgctcactaagcatcgatctgtgctgatgccaagctatggactatgtacgcaagaccgagcaatagacagaggtgcctagggtccaaacacactgaacgcacgtggaccgcctggwtcaggagcctcatcagacccttctccatgcacatccttcccaaacagtcacagattccattgaaaggagcagattctatcagttcttctgtgcagactttaagagctgaacgttctggttctggaagccatgtgactgcgcagaacaacctaagaaaccctttgtgtcctgaggggtcgttgacctctccttccgggtcggagcagtcactctgagggcaaagcgtggtccactgtgtgtgatgttttcaggatgctagggtcaaagaaagaaaccaagtggtacataagcccagcttttctgctgggctaagtgtaagtgtgagtaacatggtcaagcccctcttttttgggctatgtaaagcctttcctgccttgcattaatgctatctccctgtgtactgtttctcttaaatggagcagatagaaatctgcagtgttggcagataggtggatgggagagggatggataattttatcttctgggccacagagctggcagccccagtttgtccagagtcctttaaatggaaacccccaaatccatcccttcctttccctaacccccanggggatattcntagnattaagggcncgggataagt

SEQ ID NO: 145 - DNA, 1919 bp, Homo sapiens
  misc_feature (1882): n equals a,t,g, or c
  misc_feature (1898): n equals a,t,g, or c
  misc_feature (1919): n equals a,t,g, or c
gcccacgcgtccggccgctcgtccgcccggcttgaggcccgcggggagcgcggcgcaattcgtcggcccgcgggggggcggcctcccggcatcttcgcggcgaccaaggactaccaggaaggggagcggctgggatggcgcgtccgggccccgskagtacaaagcgggcgacctggtcttcgccaagatgaagggctacccgcactggccggcccggattgatgaactcccagaggcgctgtgaagccttcagcaaacaagtatcctatcttcttttttggcacccatgaaactgcatttctaggtcccaaagacctttttccatataaggagtacaaagacaagtttggaaagtcaaacaaacggaaaggatttaacgaaggattgtgggaaatagaaaataacccaggagtaaagtttactggctaccaggcaattcagcaacagagctcttcagaaactgagggagaaggtggaaatactgcagatgcaagcagtgaggaagaaggtgatagagtagaagaagatggaaaaggcaaaagaaagaatgaaaaagcaggctcaaaacggaaaaagtcatatacttcaaagaaatcctctaaacagtcccggaaatctccaggagatgaagatgacaaagactgcaaagaagaggaaaacaaaagcagctctgagggtggagatgcgggcaacgacacaagaaacacaacttcagacttgcagaaaaccagtgaagggacctaactaccataatgaatgctgcatattaagagaaaccacaagaaggttatatgtttggttgtctaatattcttggatttgatatgaaccaacacatagtccttgttgtcattgacagaaccccagtttgtatgtacattattcatattcctctctgttgtgtttcggggggaaaagacattttagccttttttaaaagttactgatttaatttcatgttatttggttgcatgaagttgcccttaaccactaaggattatcaagatttttgcgcagacttatacatgtctaggatccttttatcaaggcagttatgatcatcgttttcctgccttgaccccaccatcatcaaacactcagttaaatataaattaacattttttagatgaccactcaacataatgcttaagaatggaatttcctctctgtgacagaacccaggaattaattcctaaatacataacgttggtatattgaagacgaaattaaaattgtccttcagttttgaggccatgtgtaaagtttaaccatattgtaaaatatctattccgtattagaaatagctagttgacagcttatacttctcaaaattcatattgttatgtacacaaactaagtttctatatgtgaagttagtgagtctttttgtgttactccaaaataaaggcaatgatttatttttttcccagtgccaatacaattttgagctaagcactcaaggtggatactttacattttaaagctggaatcagcaacagccctatgggaaaccagacaaagcattgacttttaaatgtagacttttaaaataaactgttttcttttggaactacaattagaatagttaatattcatccttaaaccattattatgtgtacattattgttgctattgtgataatagagaattttatttatttttatgccagcttatattgtgagaacacatttagtcagtttgggttttatcaatcctgttaatgcttgtccttggaacatctttcgcgtattcacggtttgtagttgaaaagtttactgtaaaaaaatcaaaaacaaaaaaatgtattgtttttacagaataaatttattggaatgtgwactggggagtaagatttgaggttgtaagcaaactaagttagtgtnaattggcctccaatangtaacgtggaggcattaatgn

SEQ ID NO: 146 - DNA, 1379 bp, Homo sapiens
  misc_feature (925): n equals a,t,g, or c
  misc_feature (1371): n equals a,t,g, or c
  misc_feature (1377): n equals a,t,g, or c
gcccacgcgtccgcccacgcgtccgcccacgcgtccgcccacgcgtccggtaagtttagatgactggtcaatatcttaaaaatgtatattagtaagaagttcttcctggaatttttctttcgattctggcagaataaacaggtgtttttagttttcccactgtctgagccaagcaggaccctgtcccagagcaagagatgtccccttccatctctgacccttgcctgggacaagctttgatggggggccccagcttcaaggctgtggtgggaacagcacccccaaatgccagcctctcctttcttcccatccaccagtatactgcggggccatttctggtctttgtccaacaggaaacccatttctggtgggatatgccttccagtgccacagggccactcaccccatgcatctctgtcctgcccgtcagtgctgggacggacagcaagggcaagcccagtgtctggcrgataggtgggtgggaacagagaggggagaatgccgtcctaagcttctgcttggggatcccccacacgacctgggtactgcctgggaaacctgtcctaagtaaaactatggacctcgcctcgcccaccggcctgcraagccagcatctccgtgaaggtggatggaagcgcctttgtcctcaytttgagctgcaagctgggtcagcggctctgaagccctcgagtgactttctaacccaagacccagcccctggcaggaggagggtgggtgcagggctggtgggacaaaaagaggcctcagcaggcctggaagacccttccagtacatcccacagcgtgtcgagcagctgggagaacctgtgtcaagctcgagccgtcataggtccccatgaggtgtctgaagccccttcttggtgatgggaggcagaggtgctgacgttctggagcatggacgtgantcytcaagctggctccgcgtgggcccttggagggtgccaggtgtgtggtgaccttctggatgcctttaacttcatggctgcgtcattcctgatttagaactttaaccggagcttcatctagtgattgcaaaactggaccaatgggaggacggcgcgcagcccgctccctccgtggaatggagctcagctcttcggaggcatcaaagcacctgtcgcctccgtggtccccctgccgagggagtgcggcctctgcaaggttcgggggtggcttcgtttgcctggagtggccggccctgcttgtgccatgtggatgtttgtgagcctcggtcctacagcactgtgtaggctgcatctgtttcgtgctggtcctgttgacttgtatgatatccacaaataaatattttcatggcaaaaaaaaaaaaaaaaaaaaaaaaaaaaaggggggncccccnaa

SEQ ID NO: 147 - DNA, 514 bp, Homo sapiens
  misc_feature (3): n equals a,t,g, or c
  misc_feature (406): n equals a,t,g, or c
  misc_feature (412): n equals a,t,g, or c
  misc_feature (418): n equals a,t,g, or c
ttnggaaactgatcacttatcaaggctttatatattctttacggatttagacatcaccataccaagaagcttactccatctattccggtctttgtaggacaggcttcatttttcagcccatgttctgtaagccacacagtatgcctgcagaagctgcttatcggagccaaatataattgtcagtacaatttaaagaccactatgtgtccccggagaccaacctgtttatttccctgaaagaccgcaacaccccacacaacatgtttcagacatttggaccttgttagataagacacttgtaggagaaagagatttcttaaattaagtagcttatatacccctagagaaggccatacaaatctgcggacgcgtgggcggacgcgtggggggaccgtgggtcgaacgnacccancgtccncggacgcgtgggcggacgcgtgggcggacgcgtgggcggacgcgtgggcggacgcgtgggcggacgcgtgggcggacgcgtgggcggacgcgtggg

SEQ ID NO: 148 - DNA, 2058 bp, Homo sapiens
gtgcgcccgcgcgccccgggagcctacccagcacgcgctccgccccactggttccctccagccgccgccgtccagccgagtccccactccggagtcgccgctgccgcggggacatggtcctctgcgttcagggacctcgtcctttgctggctgtggagcggactgggcagcggcccctgtgggccccgtccctggaactgcccaagccagtcatgcagcccttgcctgctggggccttcctcgaggaggtggcagagggtaccccagcccagacagagagtgagccaaaggtgctggacccagaggaggatctgctgtgcatagccaagaccttctcctaccttcgggaatctggctggtattggggttccattacggccagcgaggcccgacaacacctgcagaagatgccagaaggcacgttcttagtacgtgacagcacgcaccccagctacctgttcacgctgtcagtgaaaaccactcgtggccccaccaatgtacgcattgagtatgccgactccagcttccgtctggactccaactgcttgtccaggccacgcatcctggcctttccggatgtggtcagccttgtgcagcactatgtggcctcctgcactgctgatacccgaagcgacagccccgatcctgctcccaccccggccctgcctatgcctaaggaggatgcgcctagtgacccagcactgcctgctcctccaccagccactgctgtacacctaaaactggtgcagccctttgtacgcagaagcagtgcccgcagcctgcaacacctgtgccgccttgtcatcaaccgtctggtggccgacgtggactgcctgccactgccccggcgcatggccgactacctccgacagtaccccttccagctctgactgtacggggcaatctgcccaccctcacccagtcgcaccctggaggggacatcagccccagctggacttgggcccccactgtccctcctccaggcatcctggtgcctgcatacctctggcagctggcccaggaagagccagcaagagcaaggcatgggagaggggaggtgtcacacaacttggaggtaaatgcccccaggccgcatgtggcttcattatactgagccatgtgtcagaggatggggagacaggcaggaccttgtctcacctgtgggctgggcccagacctccactcgcttgcctgccctggccacctgaactgtatgggcactctcagccctggtttttcaatccccagggtcgggtaggacccctactggcagccagcctctgtttctgggaggatgacatgcagaggaactgagatcgacagtgactagtgaccccttgttgaggggtaagccaggctaggggactgcacaattatacactatttatttatttattctccttggggttggtgtcaggggcgagccaaccccacctctatgccctgagccctggtagtccagagaccccaactctgccctggcttctctggttcttccctgtggaaagcccatcctgagacatcttgctggaaccaaggcaatcctggatgtcctggtactgacccacccgtctgtgaatgtgtccactctcttctgcccccagccatatttggggaggatggacaactacaataggtaagaaaatgcagccggagcctcagtccccagcagagcctgtgtctcaccccctcacaggacagagctgtatctgcatagagctggtctcactgtggcgcaggccccggggggagtgcctgtgctgtcaggaagagggggtgctggtttgagggccaccactgcagttctgctaggtctgcttcctgcccaggaaggtgcctgcacatgagaggagagaaatacacgtctgataagacttcatgaaataataattatagcaaagaacagtttggtggtcttttctcttccactgatttttctgtaatgacattatacctttattacctctttattttattacctctataataaaatgatacctttcatgtaaaaaaaaaaaaaaaaaaaaaaaaaaaaaaaaaaaaaaaaaaaaaaaaaag

SEQ ID NO: 149 - DNA, 1781 bp, Homo sapiens
ggcaattactaaggaaggattgtatttatgaggataacttcattatttctctctctttttaaatctctcattaggtggctatggaggcttttacaacagtgatggatatggaggaaattataactcccagggggttgactggtggggtaactgagcctgctttgcagtaggtcaccctgccaaacaagctaatatggaaaccacatgtaacttagccagactataccttgtgtagcttcaagaactcgcagtacattaccagctgtgattctccactgaaattttttttttaagggagctcaaggtcacaagaagaaatgaaaggaacaatcagcagccctgttcagaaggtggtttgaagacttcattgctgtagtttggattaactcccctcccgcctacccccatcccaaactgcatttataattttgtgactgaggatcatttgtttgttaatgtactgtgcctttaactttagacaactttttattttgatgtcctgttggctcagtaatgctcaagatatcaattgttttgacaaaataaatttactgaacttgggctaaaatcaaaccttggcacacaggtgtgatacaacttaacaggaatcatcgattcatccataaataatataaggaaaaacttatgcggtagcctgcattagggctttttgatacttgcagattgggggaaaacaacaaatgtcttgaagcatattaatggaattagtttctaatgtggcaaactgtattaagttaaagttctgatttgctcactctatcctggataggtatttagaacctgatagtctttaagccattccagtcatgatgaggtgatgtatgaatacatgcatacattcaaagcactgttttcaaagttaatgcaagtaaatacagcaattcctctttcaacgtttaggcagatcattaattatgagctagccaaatgtgggcatactattacagggaaagtttaaaggtctgataacttgaaataggtttttaggagaattcatctacttagactttttaaatgcctgccataaatgaaattgaaatggtagaatggctgaccacagcaatgaccagccctcattagggccctggatgatttttggtctaataacgcatgctagtgttgatgttttttggtcaagagggtatgaacaggaagaattaaatgcagcaggctttattttaaatgccgattcacattactctgttcaagctgcgttgagatgttaaactggcttactatagacttcgtaaaaatggctccagaagagtaacaaactgaaatctttgagatcacacaggttggaaatatgtacataactgcacaaggtgtcaattctgctctacagtgcagttttagtcagttttagttgcataggtttccattgtatttatagtctgtttatgctaaatctggccaaagatgagcattgtccaccactaaaatgcctctgccactttgaattctgtgctaattttgtggccagaatgcggtgatcaaaacgctccatctttttacagtggcataggaagacggcaaaaatttcctaaagtgcaatagattttcaagtgtattgtgccttgttctaaaacttttattaagtaggtgcacttgacagtattgaggtcatttgttatggtgctatttcaattagtctaggtttaggcccttgtacattttgcccataactttttacaagtacttcttttatkgcwcattaaaagcggggggcctaatcactatgccggattgaggcgcagagg

SEQ ID NO: 150 - DNA, 1709 bp, Homo sapiens
  misc_feature (1612): n equals a,t,g, or c
  misc_feature (1660): n equals a,t,g, or c
  misc_feature (1678): n equals a,t,g, or c
gcccacgcgtcgcccacgcgtycggaggctcgggtcgttgtggtgcgctgtcttcccgcttgcgtcagggacctgcccgactcagtggccgccatggcatcagatgaaggcaaactttttgttggagggctgagttttgacaccaatgagcagtcgctggagcaggtcttctcaaagtacggacagatctctgaagtggtggttgtgaaagacagggagacccagagatctcggggatttgggtttgtcacctttgagaacattgacgacgctaaggatgccatgatggccatgaatgggaagtctgtagatggacggcagatccgagtagaccaggcaggcaagtcgtcagacaaccgatcccgtgggtaccgtggtggctctgccgggggccggggcttcttccgtgggggccgaggacggggccgtgggttctctagaggaggaggggaccgaggctatggggggaaccggttcgagtccaggagtgggggctacggaggctccagagactactatagcagccggagtcagagtggtggctacagtgaccggagctcgggcgggtcctacagagacagttacgacagttacgctacacacaacgagtaaaaacccttcctgctcaagatcgtccttccaatggctgtgtgtttaaagattgtgggagcttcgctgaacgttaatgtgtagtaaatgcacctccttgtattcccactttcgtagtcatttcggttctgatcttgtcaaacccagcctgaccgcttctgacgccgggatggcctcgttactagacttttctttttaaggaagtgctgtttttttttgagggttttcaaaacattttgaaaagcatttacttttttgaccacgagccatgagttttcaaaaaaatcgggggttgtgtgggtttttggtttttgttttagtttttggttgcgttgcctttttttttttagtggggttggccccatgaagtgggtgccccactcacttctctgagatcgaacggactgtgaatccgctctttgtcggaagctgagcaagctgtggcttttttccaactccgtgtgacgtttctgagtgtagtgtggtaggaccccggcgggtgtggcagcaactgccctggagccccagcccctgcgtccatctgtgctgtgcgccccacagtagacgtgcagacgtccctgagaggttcttgaagatgtttatttatattgtccttttttactggaagacgtacgcatactccatcgatgttgtatttgcagtggctgaggaattcttgtacgcagttttctttggctttacgaagccgattaaaagaccgtgtgaaatgaaccttgctctgacaattcccttgcattgcaccacacactccttgctgcgggctcctgcagccagacctgagcagagagagaaggtggagaagcagcgggtctgcaagccttccctggggcctgcagagctagaaagggaggcccagcagactggcgctggtcagggtaggggagccaggcgggggacgggagcgggcagctcaggcctcagggcagccctggggaggcttctggcatggtggccagaaggctggactgtgcgggcaacttancaaggacatggactgcactgacgtgactggatgctcatctagagcagncaagacaaagcactggcncccaggggacttcagaaggcaacggttacta

SEQ ID NO: 151 - DNA, 922 bp, Homo sapiens
  misc_feature (906): n equals a,t,g, or c
  misc_feature (915): n equals a,t,g, or c
  misc_feature (922): n equals a,t,g, or c
gcggaatctacaccttcccggccagcggtacaactgcagaactgcaggagactatctttctagacaaggcagttgaggaggagggagcgcttgagggggactggcctggcgtgcactccgcacctcggggacattattgcgcgtggaacggctgcttttggaagactattgcccagaagaaaagatgtttggttttcacaagccaaagatgtaccgaagtatagagggctgctgtatttgcagagctaagtcctccagttctcgattcactgacagtaaacgctatgaaaaggacttccagagctgttttggattgcatgagactcgttcaggagacatctgcaatgcctgtgtcctgcttgtgaaaagatggaagaagttgccagcaggatcaaaaaaaaactggaatcatgtggtagatgcaagggctggacccagtctaaagactacattgaaaccaaagaaagtgaaaactctatctgggaacaggataaaaagcaaccagatcagtaaactgcagaaggaatttaaacgtcataattctgatgctcacagtaccacctcaagtgcctccccagctcaatctccttgttacagtaaccagtcagatgacggctcagatacagagatggcttctggttctaacagaacaccagttttttcctttttagatctcacttactggaaaagacagaagatatgttgtgggatcatctataaaggccgttttggggaagtcctcattgacacacatctcttcaagccttgctgcagcaataagaaagcagctgctgagaagccagaggagcagggccagagcctctgcccatctccactcaggagtggtgactgaggtttttatgtagaaggggaacaaaaaaaaaaatatctgaattttgaaaaccncaaaggtanaaaatgn

SEQ ID NO: 152 - DNA, 635 bp, Homo sapiens
  misc_feature (13): n equals a,t,g, or c
  misc_feature (594): n equals a,t,g, or c
  misc_feature (614): n equals a,t,g, or c
  misc_feature (616): n equals a,t,g, or c
  misc_feature (628): n equals a,t,g, or c
cggacgcgtgggngtgacacgcagcccacggtctgtactgacgcgccctcgcttcttcctctttctcgactccatcttcgcggtagctgggaccgccgttcagtcgccaatatgcagctctttgtccgcgcccaggagctacacaccttcgaggtgaccggccaggaaacggtcgcccagatcaaggctcatgtagcctcactggagggcattgccccggaagatcaagtcgtgctcctggcaggcgcgcccctggaggatgaggccactctgggccagtgcggggtggaggccctgactaccctggaagtagcaggccgcatgcttggaggtaaagtccatggttccctggcccgtgctggaaaagtgagaggtcagactcctaaggtggccaaacaggagaagaagaagaagaagacaggtcgggctaagcggcggatgcagtacaaccggcgctttgtcaacgttgtgcccacctttggcaagaagaagggccccaatgccaactcttaagtcttttgtaattctggctttctctaataaaaaagccacttagttcaaaaaaaaaaaaaaaaamtcggggggggcccgkancccaatttsccctatagggngncgtttaaattcnttggcgg

SEQ ID NO: 153 - DNA, 2328 bp, Homo sapiens
acggcagtggcactcacccggctcgcgcggccccggcgccccacgcgcgcgcgtcgttctcccgcccgctcgctccccggcgctcacacctgagctcactcgcgcacgcccgcccggcccgagaaccgcgccgccgcctcggccccgcggaagccccgccgcgccatgtcttcgcctcccgaaggaaactagagactaaagctggacacccgcccgccgtgaaagctggtggaatgcgaattgtgcagaaacacccacatacaggagacaccaaagaagagaaagacaaggatgaccaggaatgggaaagccccagtccacctaaacccactgtgttcatctctggggtcatcgcccggggtgacaaagatttccccccggcggctgcgcaggtggctcaccagaagccgcatgcctccatggacaagcatccttccccaagaacccagcacatccagcagccacgcaagtragcctggagtccaccagcctgccccatggccccggctctgctgcacttggtatttccctgacagagagaaccagcagtttcgcccaaatcctactctgctgggaaatctaaggcaaaaccaagtgctctgtcctttgccttacatttccatatttaaaactagaaacagctccagcccaaaccttgtttatggggagtctggttggatgtcatttgaggatcattgtgcccctagaggtgccattagcagaatttgccaagatccgagaaaaattttagctttagttctatttcagcagtcacctgacgtccttgtctatggtcttaaaaacaagaaggcacacatttgagaagatgagattaaggttaggagaaaacctcagtcattgcatgctttttagtatgggccaataaaatctcaacacctgtgggagagtaagaactaagggaatgagtttgggcggcccctcataaaggaccttagaggcagggaacagcaatgccaaatttccctctctcgtgagatgggggatcctgtgcaggctgatgaggcacccatgagaaaagccgaaaaagcatgcatcttagaaatagcccctcaattccaggagtcaacatgccaaagaatgaggctggagacaggtagctccgagggaggacttctggcatgagatctcggcacggcaagcccagcatcgcctcagcccagacaggctccaccaggagatcaagcaagggctgcctttcaggagtcacctcctgagccacttcagagttctggaagtgaccacggaccagggtggaggaatagacttctagttcattctgggacacttgagccagagagttgaaagcttggaaagaccagataagaaacctgccctttgtctccctagggacatgagacaccacattccatttgtgctagaaaaacctatccactgatgagtctaactgttccaaacgcctcccacctggtgtgcacagctgcctgggtccattgtcacttgggtgcatcaggttgtcctccgatttttagatgagtttcctgtctagagatgtcctagtctgctcactggctggtggcagtagggtaccctgcgtcctcgaaaagccagagggttcacctagtcagacgaaactccagaacagtgcttgtggagggcctgactgtcctgctcacccacagccgatctgctgcaggtcagcaactgtgtcgtgagcagctgccaaccaccagcctttctggtgctgttctccagttcacgtctgccagctggtgagggcagaggcagacctggtcagacccagcgcccctcctccctgagggagcatggcacagcctcacacttgaaagacggtgtttggtttcccatctaatcaacttaagggaagccggcatgtacccttcaaggccctgtcaccacctatttcctgatcagttggtataaactgagggtggcttttagagacccagacttggttggcagcgctgccatggaacaccccagcaagcacctcccagcctgcctttcggagcagcacccaggaggggatgccgcgctccagcaacaccaggtcaggcctgtgcagacccctgccctgccgctgcagaaatccagaagcatccttaatgcttctcagtcttcagccagagggagggctgttatttccagaggtgcgctttttatgtacttttagctagatgtggcatgcatctgtgagctttagatcattaaatccaaaatgtttgcctaaatgagtttatcagttgttaacttcaagaatattaaatgatttataataaagctcctgcatttctctccaaaaaaaaaaaaaaaaaaaaaaaaaaaaat

SEQ ID NO: 154 - DNA, 1268 bp, Homo sapiens
  misc_feature (80): n equals a,t,g, or c
aattcggcagagcaggaggggagccagtggtccctgcctgtccttcacagtgtccctgacccagcgtgcctcacactggncagggtcagcaaaggtctggctgcagtcaggtcctctgttcctcgcgctggcggggtcagcagacgtctggccgcagtgaggtccactgttctctgcagggctgtgggctgcatactggccgagctgctggcgcacaggcctcttctccccggcacttccgagatccaccagatcgacttgatcgtgcagctgctgggcacgcccagtgagaacatctggccgggcttttccaagctgccactggtcggccagtacagcctccggaagcagccctacaacaacctgaagcacaagttcccatggctgtcggaggccgggctgcgctgctgcacttcctgttcatgtacgaccctaagaaaagggcgacggccggggactgcctggagagctcctatttcaaggagaagcccctaccctgtgagccggagctcatgccgacctttccccaccaccgcaacaagcgggccgccccagccacctccgagggccagagcaagcgctgtaaaccctgacggtgggcctggcacacgcctgtattcccacaccaggtcttccgatcagtggtgtctgtgaagggtgccgcgagccaggctgaccaggcgcccgggatccagctcatccccttggctgggaacatcctccactgacttcctcccactgtctgccctgaacccactgctgcccccagaaaaaggccgggtgacaccggggggctcccagcccgtgcaccctggaagggcaggtctggcggctccatccgtggctgcaggggtctcatgtggtcctcctcgctatgttggaaatgtgcaaccactgcttcttgggaggagtggtgggtgcagtccccccgctgtctttgagttgtggtggacgctggcctgggatgagagggcccagaagaccttcgtatcccctctcagtcgcccggggctgtcccgtgcatgggttggctgtggggaccccaggtgggcctggcaggactccagatgaggacaagagggacaaggtatggggtgggagccacaattgaggataccccgagactaccaggagagccctgggctggaggctgagctgcatccctgctccccacatggaggacccaacaggaggccgtggctctgatgctgagcgaagctataggctcttgttggataaaagcttttttaasagaaaaaaaaaaaaaa

SEQ ID NO: 155 - DNA, 4299 bp, Homo sapiens
  misc_feature (2813): n equals a,t,g, or c
gtcagccctcgcgctgggggcgcaggaaacaatagaggccgcgcgcacagagcgagctcttgcagcctccccgcccctcccgcaacgctcgaccccaggattcccccggctcgcctgcccgccatggccgacaaggaagcagccttcgacgacgcagtggaagaacgagtgatcaacgaggaatacaaaatatggaaaaagaacaccccttttctttatgatttggtgatgacccatgctctggagtggcccagcctaactgcccagtggcttccagatgtaaccagaccagaagggaaagatttcagcattcatcgacttgtcctggggacacacacatcggatgaacaaaaccatcttgttatagccagtgtgcagctccctaatgatgatgctcagtttgatgcgtcacactacgacagtgagaaaggagaatttggaggttttggttcagttagtggaaaaattgaaatagaaatcaagatcaaccatgaaggagaagtaaacagggcccgttatatgccccagaacccttgtatcatcgcaacaaagactccttccagtgatgttcttgtctttgactatacaaaacatccttctaaaccagatccttctggagagtgcaacccagacttgcgtctccgtggacatcagaaggaaggctatgggctttcttggaacccaaatctcagtgggcacttacttagtgcttcagatgaccataccatctgcctgtgggacatcagtgccgttccaaaggagggaaaagtggtagatgcgaagaccatctttacagggcatacggcagtagtagaagatgtttcctggcatctactccatgagtctctgtttgggtcagttgctgatgatcagaaacttatgatttgggatactcgttcaaacaatacttccaaaccaagccactcagttgatgctcacactgctgaagtgaactgcctttctttcaatccttatagtgagttcattcttgccacaggatcagctgacaagactgttgccttgtgggatctgagaaatctgaaacttaagttgcattcctttgagtcacataaggatgaaatattccaggttcagtggtcacctcacaatgagactattttagcttccagtggtactgatcgcagactgaatgtctgggatttaagtaaaattggagaggaacaatccccagaagatgcagaagacgggccaccagagttgttgtttattcatggtggtcatactgccaagatatctgatttctcctggaatcccaatgaaccttgggtgatttgttctgtatcagaagacaatatcatgcaagtgtggcaaatggcagagaacatttataatgatgaagaccctgaaggaagcgtggatccagaaggacaagggtcctagatatgtctttacttgttgtgattttagactccccttttttcttctcaaccctgagagtgatttaacactggttttgagacagactttattcagctatccctctatataataggtaccaccgataatgctattagcccaaaccgtgggtgttttctaaatattaataggggggcttgattcaacaaagccacagacttaacgttgaaattttcttcaggaattttctagtaacccaggtctaaagtagctacagaaaggggaatattatgtgtgattatttttcttcttatgctatatccccaagtttttcagactcatttaagtaaaggctagagtgagtaaggaatagagccaaatgaggtaggtgtctgagccatgaagtataaatactgaaagatgtcacttttattcaggaaatagggggagattcaagtcgtatagattcctactcgaaaatcttgacacctgactttccaggatgcacattttcatacgtagaccagtttcctcttggtttcttcagttaagtcaaaacaacacgttcctctttccccatatattcatatatttttgctcgttagtgtatttcttgagctgttttcatgttgtttatttcctgtctgtgaaatggtgtttttttttttgttgttggttttttttttttttttttaacttgggaccaccaagttgtaaagatgtatgtttttacctgacagttataccacaggtagactgtcaagttgagaagagtgaatcaataacttgtatttgttttaaaaattaaattaatccttgataagagttgctttttttttttaggagttagtccttgaccactagtttgatgccatctccattttgggtgacctgtttcaccagcaggcctgttactctccatgactaactgtgtaagtgcttaaaatggaataaattgcttttctacataaccccatgctgatgggttttatttagtataaaacatccatcaaacaccagtctctggcttctagaagagtccttcagatgacagttgttgtccatggtctttgactatcaagagcagaattaaatgtaatagtcccagagctgtagaaaagaactttactccttcccagggaaagtgaaagacataaaacactgaatcagaggtggcacagattagtctttgataaggtaacgtttctttgaagtctgtctgtagagaactacatggacttccaagagtgtcaaaggcagtgtggtagagagaatttaaggcaagatttaaatttggaaaaggtgcttgaaccttttctcagaggttttatttccccagtatgtttttcactggggcctttacttaggttagaaataataggctttgaaggcctctatcaccagatgcaataaccagataaaattcctgttttttncccaatcgcttagtttttkgtkgttgttgttttttaactgagtagatcattctgacccagaactactttcatgaggtaagatctttgggaaaatctgaatagcgttaaccattagattcaaatctcaaatggtttcttttcaagtctagttgttttagagtatagtgagaaataccttgacacaattttaagagtaaactatatgggtcagcatatccttgaacaaaaagtagactttgtaaaagtattcatttaaattctaacactcgtggcacaaaagaatggaaattgtaaacccatgtaatggaaattggctatctttttgaccccacatgtgcccctcaaaaatgtttttggtttgggtcaacacaaggcaagatacattctttaaaatactcccagatgtgtccatacattcatcctttactcagtgcatatgtgagggttgttgctggaagacaggaggctcatctttcctttccttggtgcattgagatcagtatcaacagcagatgaaatagaatccagcaaagagttgacatgttctgcctccggccaactctagaatctttttaagcaggtcagccagtatttgcaacttccacaggatgaattgcttgccaagtttctggcactcttgtctggttggaagagtacatccaaagggtacttagtgatcctttgctaagaagttttttgctgtttccgggttacagatwtggccatatatttctaaacagcccttataagtagagagctcttcagcaagactgagccttagctgttccatctctttgttcttctgttgctggagttgcaccccatttmttaactgcytctgcgttcttccatttcctccagctgttcctgcatgagatggccaagaacatttctaatgagccaaacaataaaaactcacattgtccactcttacttataaaacacttttttgttcattgtttaatcttgatagcagtattgaggctggtatttatatgataggttatgaaacaggttcaaagaagttgtgtcttggaaaaaaagtgacaatgcttttgaaaatgatgacgaaaaaggcatcttgtctgttaaccacagcttgctttaatagaatcctggggagggtgattgggactttttagtattacaaccttagtgtcattgaggaggattttggtctagttagtgggctgagtttcatatacctctccctccatgtgcaggtttgttaagataattggtagtttttaataatataaaatacttaagttgaaatacaaaagtgtggcamcaattattaaatattggctagaattctaggagagttacacaactagtggaagtccatgtttagaaaataaatggcttgtttaaggaaaagtttttgtgtccaaagctccttaaagtcagagagatttctacctggtacttaacatcatatggaaattgatgctttagtgagggtgttggctatcctattgtcaat

SEQ ID NO: 156 - DNA, 1006 bp, Homo sapiens
cacgcgtccgcccacgcgtcgacccacgcgtccgccgaaagcgaagaaggaagctcctgcccctcctaaagctgaagccaaagcgaaggctttaaaggccaagaaggcagtgttgaaaggtgtccacagccacaaaaagaagaagatccgcacgtcacccaccttccggcggccgaagacactgcgactccggagacagcccaaatatcctcggaagagcgctcccaggagaaacaagcttgaccactatgctatcatcaagtttccgctgaccactgagtctgccatgaagaagatagaagacaacaacacacttgtgttcattgtggatgttaaagccaacaagcaccagattaaacaggctgtgaagaagctgtatgacattgatgtggccaaggtcaacaccctgattcggcctgatggagagaagaaggcatatgttcgactggctcctgattacgatgctttggatgttgccaacaaaattgggatcatctaaactgagtccagctgcctaattctgaatatatatatatatatatcttttcaccataaaamatgcctgtctgtcaatttctggttgggctgggaggccacacacacacactgacatgacagggcttgggcaagactcctgttctacttatccttttgaaatacctcaccctgccactccaccatgtatgatcattccagagatctttgtgactagagttagtgtcctaggaaaaccagaactcagaacttgcctccatggttgagtaacaagctgtacaagaaccccttttatccctggaagaggctgtgtatgaaaccaatgcccagggtttgaagggtgttagcatccatttcaggggagtgtggattggctggctctctggtagcattttgtcctcacacacccatctactatgtccaaccggtctgtctgcttccctcaccccttgcccaataaaggacaaggacttcaaaaaaaaaaaaaaaaaaaaaaaaaaaaaaaaaaaaa

SEQ ID NO: 157 - DNA, 1686 bp, Homo sapiens
gctggctcacctccgagccacctctgctgcgcaccgcagcctcggacctacagcccaggatactttgggacttgccggcgctcagaaacgcgcccagacggcccctccaccttttgtttgcctagggtcgccgagagcgcccggagggaaccgcctggccttcggggaccaccaattttgtctggaaccaccctcccggcgtatcctactccctgtgccgcgaggccatcgcttcactggaggggtcgatttgtgtgtagtttggtgacaagatttgcattcacctggcccaaaccctttttgtctctttgggtgaccggaaaactccacctcaagttttcttttgtggggctgccccccaagtgtcgtttgttttactgtagggtctcccgcccggcgcccccagtgttttctgagggcggaaatggccaattcgggcctgcagttgctgggcttctccatggccctgctgggctgggtgggtctggtggcctgcaccgccatcccgcagtggcagatgagctcctatgcgggtgacaacatcatcacggcccaggccatgtacaaggggctgtggatggactgcgtcacgcagagcacggggatgatgagctgcaaaatgtacgactcggtgctcgccctgtccgcggccttgcaggccactcgagccctaatggtggtctccctggtgctgggcttcctggccatgtttgtggccacgatgggcatgaagtgcacgcgctgtgggggagacgacaaagtgaagaaggcccgtatagccatgggtggaggcataattttcatcgtggcaggtcttgccgccttggtagcttgctcctggtatggccatcagattgtcacagacttttataaccctttgatccctaccaacattaagtaagtctgggaaccctgcctcctaaggggacaggtctggggtcctggaatagggaggagggcagaggcacgccagggtttctaaccacccccttctyttcacaggtatgagtttggccctgccatctttattggctgggcagggtctgccctagtcatcctgggaggtgcactgctctcctgttcctgtcctgggaatgagagcaaggctgggtaccgtgcaccccgctcttaccctaagtccaactcttccaaggagtatgtgtgacctgggatctccttgccccagcctgacaggctatgggagtgtctagatgcctgaaagggcctggggctgagctcagcctgtgggcagggtgccggacaaaggcctcctggtcactctgtccctgcactccatgtatagtcctcttgggttgggggtgggggggtgccgttggtgggagagacaaaaagagggagagtgtgctttttgtacagtaataaaaaataagtattgggaagcaggcttttttcccttcagggcctctgctttcctcccgtccagatccttgcagggagcttggaaccttagtgcacctacttcagttcagaacacttagcaccccactgactccactgacaattgactaaaagatgcaggtgctcgtatctcgacattcattcccacccccctcttatttaaatagctaccaaagtacttcttttttaataaaaaaataaagatttttattaggtaaaaaaaaaaaaaaaaaaaaaaaaaaaaaaaaaaaaaaaaaaaaaaaaaaa

SEQ ID NO: 158 - DNA, 4147 bp, Homo sapiens
  misc_feature (13): n equals a,t,g, or c
  misc_feature (292): n equals a,t,g, or c
  misc_feature (4145): n equals a,t,g, or c
  misc_feature (4146): n equals a,t,g, or c
cggacgcgtgggncggcccccctctctcggcccggccatcttgtgggaagagctgaagcaggcgctcttggctcggcgcggcccgctgcaatccgtggaggaacgcgccgccgagccaccatcatgcctgggcacttacaggaaggcttcggctgcgtggtcaccaaccgattcgaccagttatttgacgacgaatcggaccccttcgaggtgctgaaggcagcagagaacaagaaaaaagaagccggcgggggcggcgttgggggccctggggccaagagcgcagctcagngccgcggcccagaccaactccaacgcggcaggcaaacagctgcgcaaggagtcccagaaagaccgcaagaacccgctgccccccagcgttggcgtggttgacaagaaagaggagacgcagccgcccgtggcgcttaagaaagaaggaataagacgagttggaagaagacctgatcaacaacttcagggtgaagggaaaataattgatagaagaccagaaaggcgaccacctcgtgaacgaagattcgaaaagccacttgaagaaaagggtgaaggaggcgaattttcagttgatagaccgattattgaccgacctattcgaggtcgtggtggtcttggaagaggtcgagggggccgtggacgtggaatgggccgaggagatggatttgattctcgtggcaaacgtgaatttgataggcatagtggaagtgatagatcttctttttcacattacagtggcctgaagcacgaggacaaacgtggaggtagcggatctcacaactggggaactgtcaaagacgaattaactgacttggatcaatcaaatgtgactgaggaaacacctgaaggtgaagaacatcatccagtggcagacactgaaaataaggagaatgaagttgaagaggtaaaagaggagggtccaaaagagatgactttggatgagtggaaggctattcaaaataaggaccgggcaaaagtagaatttaatatccgaaaaccaaatgaaggtgctgatgggcagtggaagaagggatttgttcttcataaatcaaagagtgaagaggctcatgctgaagattcggttatggaccatcatttccggaagccagcaaatgatataacgtctcagctggagatcaattttggagaccttggccgcccaggacgtggcggcaggggaggacgaggtggacgtgggcgtggtgggcgcccaaaccgtggcagcaggaccgacaagtcaagtgcttctgctcctgatgtggatgacccagaggcattcccagctctggcttaactggatgccataagacaaccctggttcctttgtgaacccttctgttcaaagcttttgcatgcttaaggattccaaacgactaagaaattaaaaaaaaaaagactgtcattcataccattcacacctaaagactgaattttatctgttttaaaaatgaacttctcccgctacacagaagtaacaaatatggtagtcagttttgtatttagaaatgtattggtagcagggatgttttcataattttcagagattatgcattcttcatgaatacttttgtattgctgcttgcaaatatgcatttccaaacttgaaatataggtgtgaacagtgtgtaccagtttaaagctttcacttcatttgtgttttttaattaaggatttagaagttcccccaattacaaactggttttaaatattggacatactggttttaatacctgctttgcatattcacacatggtcaactgggacatgttaaactttgatttgtcaaattttatgctgtgtggaatactaactatatgtattttaacttagttttaatattttcatttttggggaaaaatcttttttcacttctcatgatagctgttatatatatatgctaaatctttatatacagaaatatcagtacttgaacaaattcaaagcacatttggtttattaacccttgctccttgcatggctcattaggttcaaattataactgatttacattttcagctatatttactttttaaatgcttgagtttcccattttaaaatctaaactagacatcttaattggtgaaagttgtttaaactacttattgttggtaggcacatcgtgtcaagtgaagtagttttataggtatgggttttttctcccccttcaccagggtgggtggaataagttgatttggccaatgtgtaatatttaaactgttctgtaaaataagtgtctggccatttggtatgatttctgtgtgtgaaaggtcccaaaatcaaaatggtacatccataatcagccaccatttaacccttccttgttctaaaacaaaaaccaaagggcgctggttggtagggtgaggtgggggagtattttaatttttggaatttgggaagcagacagctttactttgtaaggttggaacagcagcactatacatgaaatataaaccaaaaacctttactgtttctaaatttcctagattgctattatttggttgtaagttgagtattccacagaaagtggtaattatctcttctctcttcctccattagaaaattaggtaaataatggattcctataatgggagcatcaccacttattaaaacacacatagaatgatgaattaaaaaagttttctaggattgtcttttattctgccacatttattgataaacagtgaaggaatttttaaaaaatttttaagaattgtttgtcacgtcatttttagaaatgttctacctgtatatggtaatgtccagttttaaaaatattggacatcttcaatcttaaacatttctatttagctgattggttctcacatatacttctaaaagaaacttttatgttataagagttactttttggataagatttattaatctcagttacctactattctgacattttaggaaggaggtaattgtttttaatgatggataaacttgtgctggtgttttggatcttatgatgctgagcatgttctgcactggtgctaatgtctaatataattttatatttacacacatacgtgctacccagagattaatttagtccatatgaactattgacccattgttcattgagacagcaacatacgcactcctaaatcagtgtgtttagacttttcaagtatctaactcatttccaaacatgtaccatgttttataaacctcttgatttccagcaacatactatagaaaacacctgctactcaaaacacaacttctcagtgtcatccattgctgtcgtgagagacaacatagcaatatctggtatgttgcaagctttcaagatagcctgaacttaaaaagttggtgcattagttgtatctgatggatataaatttgcctcctagttcactttgtgtcaagagctaaaactgtgaacctaactttctcttattggtgggtaataactgaaaataaagatttattttcatgctcacttcttaaaagtcataaaaacaatcaaataggatcatgtttattgtcatgtgtttcctggkttctgacctgtgtgcacacccctgtgtgtttataatttttaaattgaattttatatggggtttttatttgctaaaaaccaggctgttgaatcacatttgggaagggtacttatcttaatgactaatgacttaattgggaaagttgaattcttgtaaaatacaaaatccaaggacttcttggatttaatctaattgtcacttcttagcagatcacttttttgataatgaaagttaagcatactgaatgctacttttgattgacaaactggctataatagtctaggggaaaaatccctaaacagataaagattcctaaagtaatggtggcagctgatgtttcagtgaacttttatcttgatgcgtttaaatggaagtaatgccagacctgagatttttaaggcatttttacagcttgtattgaaatgattggagacatggtttctttattagctattttgagacctgtggagttaagcaagacttttaaaaattggcaccatatacatctagttagttcctttactcttatttttttaaataaaagtagtacacatcaaaaaaaaaaaaaaaaaaaaaaaaactcgagggggggcccgkacccaatcgccctatgagtgatcgtanna

SEQ ID NO: 159 - DNA, 1242 bp, Homo sapiens
  misc_feature (1235): n equals a,t,g, or c
  misc_feature (1236): n equals a,t,g, or c
agcattttacggcaagggcttgacttatgagtgtggtcagaggttttagcgaggcggctgcgcagtacaacccggagcccccgcccccacgcacacattactccaacattgaggccaacgagagtgaggaggtccggcagttccggagactctttgcccagctggctggagatgacatggaggtcagcgccacagaactcatgaacattctcaataaggttgtgacacgacaccctgatctgaagactgatggttttggcattgacacatgtcgcagcatggtggccgtgatggatagcgacaccacaggcaagctgggctttgaggaattcaagtacttgtggaacaacatcaaaaggtggcaggccatatacaaacagttcgacactgaccgatcagggaccatttgcagtagtgaactcccaggtgcctttgaggcagcagggttccacctgaatgagcatctctataacatgatcatccgacgctactcagatgaaagtgggaacatggattttgacaacttcatcagctgcttggtcaggctggacgccatgttccgtgccttcaaatctcttgacaaagatggcactggacaaatccaggtgaacatccaggagtggctgcagctgactatgtattcctgaactggagccccagacccgccccctcaccgccttgctataggagtcacctggagcctcggtctctcccagggccgatcctgtctgcagtcacatctttgtggggcctgctgacccacaagcttttgttctctcagtacttgttacccagcttctcaacatccagggcccaatttgccctgcctggagttccccctggctctaggacactctaacaagctctgtccacgggtctccccattcccaccaggccctgcacacacccactccgtaacctctcccctgtacctgtgccaagcctagcacttgtgatgcctccatgccccgagggccctctctcagttctgggaggatgactccagtccctgcacgccctggcacacccttcacggttgctacccaggcggccaagctccagaccgtgccagacccaggtgccccagtgcctttgtctatattctgctcccagcctgccaggcccaggaggaaataaacatgccccagttgctgatctctaaaaaaaaaaaaaaaaaaaaaaaaaaaaaaaaaaaaaaaaaaaaaaaaaaaaaaaaaaaaaaaaaaaaaaaaaanngggggg

SEQ ID NO: 160 - DNA, 2229 bp, Homo sapiens
  misc_feature (29): n equals a,t,g, or c
  misc_feature (43): n equals a,t,g, or c
  misc_feature (55): n equals a,t,g, or c
  misc_feature (59): n equals a,t,g, or c
  misc_feature (128): n equals a,t,g, or c
  misc_feature (301): n equals a,t,g, or c
  misc_feature (2226): n equals a,t,g, or c
tcaccttcttgggcccaagccatccttcntgctttcaccttcntcagaagctggnattncaggcatgcatgcccatgcctggctactttttaaattttttgtgacacaaggtctcaccaggttgcctnaggctggtttcggattcctgggctcaagtgatcttcccacctaggtttcccagagtgttggaattacaggcgtgagccatcacatctggcttgtttatggttagttaattcattccagactctcagcctgaaamcactgagaatgtttgcatgctagttttccacatcatatncaatattattaaaatactcatttggaatagaattccatatgggttaaccagagtactgttgggatggttgtggctatttgcacgtagcagatttcctgcttttattcaaagmcaatattactggattttaaaatctgcttttamcattatttttccttttcactatmcataggtctatgaaaattatcctacttatgatttaactgaaagaaaagatttcataaaaacaactgtaaaagagctaatttcttgagatagaggacagagaagatgactcgttcccatagatttgaagatctgatttataccattataccagcaaagagaatgtatttccttttctaaatccttgttaagcaacgttagtagaacttactgctgacctttttatcttgagtgttatgtgaatttgagtttgctgttttaaattgcatttctatgccatttttagtttaaaatcttgcatggcattaattgttccttgcttttatagttgtattttgtacattttggatttctttatataaggtcatagattcttgagctgttgtggtttttagtgcacttaatattagcttgcttaaggcatacttttaatcaagtagaacaaaaactattatcaccaggatttatacatacagagattgtagtatttagtatatgaaatattttgaatacacatctctgtcagtgtgaaaattcagcggcagtgtgtccatcatattaaaaatatacaagctacagttgtccagatcactgaattggaacttttctcctgcatgtgtatatatgtcaaattgtcagcatgacaaaagtgacagatgttatttttgtatttttaaaaaacaattggttgtatataaagtttttttatttcttttgtgcagatcactttttaaactcacataggtaggtatctttatagttgtagactatggaatgtcagtgttcagccaaacagtatgatggaacagtgaaagtcaattcagtgatggcaacactgaaggaacagttaccctgctttgcctcgaaagtgtcatcaatttgtaattttagtattaactctgtaaaagtgtctgtaggtacgttttatattatataaggacagaccaaaaatcaacctatcaaagcttcaaaaactttgggaaagggtgggattaagtacaagcacatttggcttacagtaaatgaactgatttttattaactgcttttgcccatataaaatgctgatatttactggaaacctagccagcttcacgattatgactaaagtaccagattataatgccagaatataatgtgcaggcaatcgtggatgtctctgacaaagtgtgtctcaaaaataatatacttttacattaaagaaatttaatgtttctctggagttggggctcttggctttcagagtttggttaatcagtgttgattctagatgatcaacataatggaccactcctgaatgagacttaattttgtctttcaaatttactgtcttaaatcagtttattaaatctgaattttaaaacatgctgtttatgacacaatgacacatttgttgcaccaattaagtgttgaaaaatatctttgcatcatagaacagaaatatataaaaatatatgttgaatgttaacaggtattttcacaggtttgtttcttgatagttactcagacactagggaaaggtaaatacaagtgaacaaaataagcaactaaatgagacctaataattggccttcgattttaaatatttgttcttataaaccttgtcaataaaaataaatctaaatcactggtgttttaaaaaaaaaaaaaaaaaaaaaagggcggccgctctagaggatccctcgaggggcccaagcttacgcgtgcatgcgacgtcatagctctctccctatagtgagtcgtattaataggagtccaaantgg

SEQ ID NO: 161 - DNA, 1920 bp, Homo sapiens
  misc_feature (43): n equals a,t,g, or c
  misc_feature (119): n equals a,t,g, or c
  misc_feature (1755): n equals a,t,g, or c
  misc_feature (1766): n equals a,t,g, or c
  misc_feature (1832): n equals a,t,g, or c
  misc_feature (1841): n equals a,t,g, or c
  misc_feature (1915): n equals a,t,g, or c
cagacgtcctgcaggcggctggcgagtgggagcctgctgcgancccctgaagaggaggcagatgccgacctggccgaggggccccctccctggacacctgcgctcccctcaagtgaggngaccgtgaccgacatcaccgccaactccatcaccgtcaccttccgcgaggcccaggcagctgagggcttcttccgagaccgcagtgggaagttctgaatcaccgtttttactcttcttaaactgttttcttttgggcttggggtgggacttccagagatagggatgggttgggggcggggtaattattttatttaaaaaaataccgagcagcaaaaggggagaagatcccactactctcccaccacctgccctttctctgagggacgtttaccacgaggcctcaggctggggatggagagagttgctctgggagttggggtaccacccccagggcaggatggggacaggatcacctgcccgggacaccaccattatcattctcctctagtgacgcagcagctggttctgggagttaaaggagcattggaaggcccaaaccctctcccttgagtggccaccccagcctggttggctggttttccccttttctcttgtttcaattgggtctttaccttgaactctcctctctggctttgcggtgggctgtggaggctggttttraccaaaagtgagtggggcgggaggaaggggcaggaggaagggttgaggttacttggggcgagtcccttccccttcagagaggcttctatccttcccagggaggaggcgccgctgagacccttctgctgagagctctgccctcccctcatcacctggcctgtgcagaaacgctcatgcacacctggctgcacaggtgtgcacgcattacccttcgcgtgtacgttcccatgtgccccgtgaaagcatgtgtggctgcagacgtgtccacatgggccttgcgaacctgggttagaaaccctggccaggcgaacgtggggtgattcacagcacaaaagacctcaccaccacacctgcactcaccccaccttgcatgcaccttgctacctgcttgcggctttcagyggagggcaggggtctggcacaggtgcgatggcaccccatgctccaggcatacagatgtggtttctcggctgcaccgggccaggctgcgggtgtgcaggcgtctgctaagttgtgtgatgtatcagcacaggctttgagacgtctggaccctgtccttcctcccgtgaggggttcttgttctttctgactcaggtgacttttcagcccttccaattcccctctttttctgscctcccctccaactcagccaacccaggygtgggcagtcagggagggagggagtgtyccaccacgttctcagggcagcccttgactcctaagccccttcctccttccattctgcatcccctccccatccaacctaaatgccacagctggggctragctgtattcctgtggagggacctstgccgtgcctctytgaggtcaggctgtgctgtgtgaatgggcaggctttgccccagcccacccctggcaaggtgcacttgttttctggtttgtacaaggtgtcctgggggcccgtggcttccctgccagtgaggagtgacttctccctctcttccagtcctgtaggggagacaaaaccagattggggggcccaaggggagcatggaaaaggccggctcccctgtctttccttggctgtcagagtcagggtaacacacaccaaantggagtgcggncarcaagtttgaracctgcccgccctcctcgcagctctgctctgtgtcctcaggaaattcacagantctactgangcaagaaaaggttgaatcctttcccccaattccctccttcccctggtttccccaaaaccaaaaaaaagcctgcnacccc

SEQ ID NO: 162 - DNA, 2619 bp, Homo sapiens
  misc_feature (2546): n equals a,t,g, or c
ctgagagggacgcgtgccgcggagccaggcttactacgtgacccggacaccaggcatacgctaggggcagtcagctgtgccttctctttcggagttgttccgtgctcccacgtgcttccccttctccactggctgggatcccccgggctcggggcgcagtaataatttttcaccatgcatcggaaaaaggtggataaccgaatccggattctcattgagaatggagtagctgagcggcaaagatctctctttgttgtagttggggatcgaggaaaagatcaggtggtaatacttcatcacatgttatccaaagcaactgtgaaggctcggccttcagtgctgtggtgttataagaaagagctggggtttagcagtcaccggaagaaaagaatgcgacagctgcagaagaaaataaagaatggaacactgaacataaagcaggacgacccctttgaactcttcatagcagccacaaacattcgctactgctactacaacgagacccacaagatcctgggcaataccttcggcatgtgtgtgctgcaggattttgaagccttaactccaaacttgctggccaggactgtagaaacagtggaagtggtgggctagtggtcatcctcctacggaccatgaactcactcaagcaattgtacacagtgactatggatgtgcattccaggtacagaactgaggcccatcaggatgtggtgggaagatttaatgaaaggtttattctgtctctggcctcttgtaagaagtgtctcgtcattgatgaccagctcaacatcctgcccatctcctcccacgttgccaccatggaggccctgcctccccagactccggatgagagtcttggtccttctgatctggagctgagggagttgaaggagagcttgcaggacacccagcctgtgggtgtgttggtggactgctgtaagactctagaccaggccaaagctgtcttgaaatttatcgagggcatctctgaaaagaccctgaggagtactgttgcactccagctgctcgaggacggggaaaatctgcagccctgggattggcgattgctggggcggtggcatttgggtactccaatatctttgttacctccccaagccctgataacctccatactctgtttgaatttgtatttaaaggatttgatgctctgcaatatcaggaacatctggattatgagattatccagtctctaaatcctgaatttaacaaagcagtgatcagagtgaatgtatttcgagaacacaggcagactattcagtatatacatcctgcagatgctgtgaagctgggccaggctgaactagttgtgattgatgaagctgccgccatccccctccccttggtgaagagcctacttggcccctaccttgttttcatggcatccaccatcaatggctatgagggcactggccggtcactgtccctcaagctaattcagcagctccgtcaacagagcgcccagagccaggtcagcaccactgctgagaataagaccacgacgacagccagattggcatcagcgcggacactgcatgaggtttccctccaggagtcaatccgatacgcccctggggatgcagtggagaagtggctgaatgacttgctgtgcctggattgcctcaacatcactcggatagtctcaggctgccccttgcctgaagcttgtgaactgtactatgttaatagagataccctcttttgctaccacaaggcctctgaagttktcctccaacggcttatggccctctacgtggcttctcactacaagaactctcccaatgatctccagatgctctccgatgcacctgctcaccatctcttctgccttctgcctcctgtgccccccacccagaatgcccttccagaagtgcttgctgttatccaggtgtgccttgaaggggagatttctcgccagtccatcttgaacagtctgtctcgaggcaagaaggcttcaggggacctgattccatggacagtgtcagaacagttccaagatccagactttggtggtctgtctggtggaagggtcgttcgcattgctgttcacccagattatcaagggatgggctatggcagccgtgctctgcagctgctgcagatgtactatgaaggcaggtttccttgtctggaggaaaaggtccttgagacaccacaggaaattcacaccgtaagcagcgaggctgtcagcttgttggaagaggtcatcactccccggaaggacctgcctcctttactcctcaaattgaatgagaggcctgccgaacgcctggattacctgggtgtttcctatggcttgacccccaggctcctcaagttctggaaacgagctggatttgttcctgtttatctgagacagaccccgaatgacctgaccggagagcactcgtgcatcatgctgaagacgctcactgatgaggatgaggctgaccagggaggctggcttgcagcyttctggaaagatttccgacggcggttcctagccttgctctcctaccagttcagtaccttctctccttccctggctntgaacatcattcagaacaggaacatggggaagccagcccagcctgccctgagccgggaggagctggaagcact

SEQ ID NO: 163 - DNA, 1419 bp, Homo sapiens
  misc_feature (230): n equals a,t,g, or c
  misc_feature (624): n equals a,t,g, or c
  misc_feature (697): n equals a,t,g, or c
  misc_feature (1187): n equals a,t,g, or c
gatgcagctgacaccattgaaactgacactgccactgctgacaccactgttgccaacaacgtaccccccgccgccaccagcctcattgacctatggcctggcaacggggaaggggcctccacactccagggtgagcccagggcccccacgccaccctcgggtactgaggtcaccctggcagaggtgcccctgctggatgaggtggctccggagccactgctgccagcagncgaaggctgtgccacccttctcaactttgatgagctgcctgagccgccagccaccttctgtgacccagaggaagtggaaggggagcccctggctgccccccagaccccaactytgccctcagcccttgaggagctggagcaagagcaggagccggagccccacctgctaaccaatggcgagaccacccagaaggaggggacccaggccagtgaggggtacttcagtcaatcacaggaggaggagtttgcccaatcggaagagctctgtgccaaggctccgcctcctgtgttctacaacaagcctccagagatcgacatcacatgctgggatgcagacccagttccagaagaggaggagggcttcgagggtggtgattagcggtggcgccagccntaggctacccttgccaaggccgcccacctgcatcagcctctggccagacggcccgccgtgcctgcattcgcancagctccgcctggcacccactccggattccggccctggctggggacttggccgcttccctacccacagggcctgacttttacagcttttctctttttttaaaaagttgataggagacttgtacagttgactggctttcctctcgttggtagttgagacgctgttgcaaattccacccctccttccctggtccagattgtagctcttagtcctccctgctcagctggccgggttggaggcctcaccctgcttggggcctggcgtggggggagctctggtgggaaaatgtcccccacctcttttcctagttttatgtttcttgggaaaatatcactttgtattctctgtccagggcttcagatattttgcacgaattttaaaacatggcaataaatggctcgtgggctctggctccctgggaccccctccccgcccttcttttgaccccttcctgtctggcccaaaggaagtagcaggcccagctggggccnctcggctaccccccgtctcctgccgggcagttcccaggttggaggccctaggcgcggttcaggtcagggctatggatggggcccaggggctttggtggcccctccccaactccttcctctttgcttgggttcctttttcacgtttagtaactgtttttttttttttttggaaagcacaaacttctgtaacgggtcgtgctcatgtctgttaataaagaaatccagatccagg

SEQ ID NO: 164 - DNA, 3810 bp, Homo sapiens
  misc_feature (189): n equals a,t,g, or c
  misc_feature (2523): n equals a,t,g, or c
aattttcatgatctttgtatatttatatatatatattttwaaattttgcatttracttaaagtgccatgagaaaatttgcatactgcaaggtggtcctagccacctccttgatttgggtactcttggatatgttcctgctgctttacttcagtgaatgcaacaaatgtgatgaaaaaaaggagagaggncttcctgctggagatgttctagagccagtacaaaagcctcatgaaggtcctggagaaatggggaaaccagtcgtcattcctaaagaggatcaagaaaagatgaaagagatgtttaaaatcaatcagttcaatttaatggcaagtgagatgattgcactcaacagatctttaccagatgttaggttagaagggtgtaaaacaaaggtgtatccagataatcttcctacaacaagtgtggtgattgttttccacaatgaggcttggagcacacttctgcgaactgtccatagtgtcattaatcgctcaccaagacacatgatagaagaaattgttctagtagatgatgccagtgaaagagactttttgaaaaggcctttagagagttatgtgaaaaaactaaaagtaccagttcatgtaattcgaatggaacaacgttctggattgatcagagctagattaaaaggagctgctgtgtctaaaggccaagtgatcaccttcctggatgcccattgtgagtgtacagtgggatggctggagcctctcttggccaggatcaaacatgacaggagaacagtggtgtgtcccatcatcgatgtgatcagtgatgatacttttgagtacatggcaggctctgatatgacctatggtgggttcaactggaagctcaattttcgctggtatcctgttccccaaagagaaatggacagaaggaaaggtgatcggactcttcctgtcaggacacctaccatggcaggaggccttttttcaatagacagagattactttcaggaaattggaacatatgatgctggaatggatatttggggaggagaaaacctagaaatttcctttaggatttggcagtgtggaggaactttggaaattgttacatgctcacatgttggacatgtgtttcggaaagctacaccttacacgtttccaggaggcacagggcagattatcaataaaaataacagacgacttgcagaagtgtggatggatgaattcaagaatttcttctatataatttctccaggtgttacaaaggtagattatggagatatatcgtcaagagttggtctaagacacaaactacaatgcaaacctttttcctggtacctagagaatatatatcctgattctcaaattccacgtcactatttctcattgggagagatacgaaatgtggaaacgaatcagtgtctagataacatggctagaaaagagaatgaaaaagttggaatttttaattgccatggtatggggggtaatcaggttttctcttatactgccaacaaagaaattagaacagatgacctttgcttggatgtttccaaacttaatggcccagttacaatgctcaaatgccaccacctaaaaggcaaccaactctgggagtatgacccagtgaaattaaccctgcagcatgtgaacagtaatcagtgcctggataaagccacagaagaggatagccaggtgcccagcattagagactgcaatggaagtcggtcccagcagtggcttcttcgaaacgtcaccctgccagaaatattctgagaccaaatttacaaaaaaacgaaaaaaataaggattgactgggctacctcagcatacatttctgccacattcttaagtagcaaaaaaggaaaagtgctttcctcctctgcaggatgtaaggtttatcagccattaaaacttagacttctctagcttttcactagctgtgaaccagccttcctgtccatggacgtgaaactgcatagtaatgagactgtgcacactgatgtttacaagattgaaagagtctttctccgaaaatcatggtaaagaatactgagacaatgaaaaaaaatcaacaaaatatgctttctggagaactgtaccttttatggtttgcttgcacatcagtagtttctgctgaacgtgctgtcataatgaagagatttccaagattttttttcctgattagaactggtagccagtatattaaatattgatataaaaataaaagaactggaaccagattcagaatcatgaaaacaacatttttacaacaacaaaaaaactatattaaacagggtttaaaggaaattaaaacagaactatgagaagtacaatttgttatagtatagtatcaaatttctatatagattttatacctcagtggggaaaaataactgattccaatgacattcattttgttttcatctgtgatagtcatggatgcttttattttccttggggtgctgaaattgagctgaaaaaaaaaggctctttgaatatagttttaatttctctctacagttttttttgtttggtttgtgggctgttggnaattgtaatttttaattgccttctaaaaaatggaaatttaacaatgtctgatctcagctgaacaaattagatgtttcagttgctcttgggtcaactggcttacagatttacatgtgcacacacacacaaatttcttatcacattttcgacttcttcacttgacctaactgattatgcgaaatacccaagattcatgctactgtaccacagatttgttttcacagcaataaatcttcagttctttgtttatgattccacttaacaaaaggcctgcagaagtgatttattatttgggtatttggagataatacatttgatggttttttggaaaacctttttcactccatactcagatatgcttcattgtcaaatgcatatttagattagattattgaattgtaatgtttatctgctgctttttttaaataaaatttgactgaaaatgtttaattggcattttttaatgacttagccaaagaagtgcagctattattccatattaataggcttgcatttcttttcctaaatcttatttaggctaaatcagttttatttttctctgattttttttaataccacagaatcacctgagtgtcaattgaaagttgtcaattaaaaggtaaccttttaatctcgtaggaggaatctcattaagacatttttcctgatatgtagagcagtctgttggcaaaaatgcatatattttctttcatatttgtaaaattatatttaatggaattcttttctttgattatcaaggactttcactgcaggcagtgctatttcttgtgcctaagaatgtttccaaaagtcgcatcgctaatgatatttgccaagttgagtgtacacaaagtttctcatatcctgttcaagttaatcaacatcaagcacrtggggatgctttagggtgagtctatagtacaaaatgcataaaccatgtccccaggaaatttgaaaggaagcaggtgctgaatggaatttttttccttttccatgagctgtgttaattctatctccagtaggcctaatgcttgaataagcaagatgtctaatcaataaattattttcatgctcagaatttcaggtttttgtactccagcatagcttggtcttatttcttactgtatgaaagcttaacagcaatgtgatttaaggttttgttttaaatgggagatgtaagtgatttaattcatgggtacttttagaacctgatagataatcccattgcctttatttttctaattaaagaattcctaaatactttgaaaatacaaaatattcctgaaa

SEQ ID NO: 165 - DNA, 817 bp, Homo sapiens
acagctgtgagccactgcgtccagccctaagatgattcatacctatcggggaaaacagtgccactggagagaacaggctggcctctgcactctggattggtgacaggagttatccaggcctgtctgaaggcaatagcaggcctcccatccctggaccgccttatgtggcctcccctgacctctggtcccactgggaagactcagccctgcccccaccaagcctgaggcctgtgcagcccacctgggagggctcctcagaggcaggcctggactgggctggggccagcttctccccagggactccratgtgggcggccttggatgagcagatgctgcaggagggcatccaggcmtcgcttcttgacgggccagcccaggaaccccagagcgcaccatggctgtccaagtcctctgtctcctctctgcggctgcagcagctggagcgcatgggcttccctacggagcaggcggtggtggcactggcagccacaggccgtgtggagggtgccgtgtcactgttggttggaggacaagtgggcactgagaccctggtgacccatggaaagggtgggcctgcccactccgagggtcctgggcctccctagcccaggcagagagtggggcacaggcaggcccttgggtgctaagggctgggctgcatgtgggtagcccgagctcctactctgtctaaagagggccacagtggggagcaggggcacctctggaggcaggagaggccccccagcatgctgccctagtacgtgtttagaataaaaaccagtttgtttttcaacctggacctccttggaaaaaaaaa

SEQ ID NO: 166 - DNA, 1578 bp, Homo sapiens
  misc_feature (16): n equals a,t,g, or c
  misc_feature (38): n equals a,t,g, or c
aggcagaagtcttctnttctctggcctcaccccctcantcgccatagagctgggcctggccttgctgggaatggaggcatccttccaaacctgggggacgggggtggggggtggtwgtggtgggagggaaaccatgtcttgctaaacctgtttctggtgcctcccatccccagacccaccagacaccacacagcagacaatacacacccactcgcacaagcttccatccacatgtgttgtactttcagctctaggcatgcagacaaccccacacggccacaccaccacatgcccaagtgtacacacacagagccacaccgtccctctgggcctgctggctcctcccttggctttcccttggcccacttccagggcccaggtgctgcaactaaatgtgaaagctcagtggccgctccttctttcagcccatcaaccagcattggtcccatagggaagcacaggggactcaccctctttcatatcccttgccctgccctgaaatggacaatcactttttgggataggttgaaatttttaaagagcctgcatcattcggttccctcaaagggaagcccttgccagtgggggtttgaaagagaatttttggaaccaacattcaaattctgcctcatctggagggaaaccaaaattgggagggggaagaggacccctgatgttttgctgcttccagagatattagaaactgactcacttgattggaaaatggacaaaagtgccttgacgtggagggtgggcaccagatggggaccagccttgccaactgctgctgtggcctccagcttggctggttttgcaggccgccagcaggaaggcgaaggtggtagtacagcaagaggcactggcggggcagcaggcctgcaggagctgtttttccattgctaggcctgacccctctctacctgtgagcgttcagggggtccctgagatagtttagatgcccccccatcttagacctcagctcccacagtgccttttaagggggacctcacctcctgtgcacagcccacccactttcctctgcttccctggcacascccaggcatagacgagctggcgttggacccagttcttcccccttttcagccccacagctgctgccacaggggccaactagggccaggtggaaggggagctgagaagccaacccctagcccaggggtgctgtgggaactgggatccaatttgtagcttcctgcctggcttcagagagcccagcaaccttctaggcctgctttccagacttctgagatagcctgggatgagcaatcctgttacagtacatctggaccttccctacctgggctctggggaggctgtgggcctggagagggaaaaggagggagggggtgtctgcaccacctgggaagatagcacaaggcctaatgaggtcaccctgactccccaccccagcatttcattcataccagataatagctgcattactgccaactgaccttataaccctctgcaccttcaaaaagattcatggtttttaattgctgcttttaataacatttgttaaagttaaaaaaaaaaaaaaaatcttcgggggggggg

SEQ ID NO: 167 - DNA, 1694 bp, Homo sapiens
gcccacgcgtccgcccacgcgtccgcccacgcgtssgggcggcggcggcgacggccgggcgctcctgaagcagcagttatggagcttccctcagggccggggccggagcggctctttgactcgcaccggcttccgggtgactgcttcctactgctcgtgctgctgctctacgcgccagtcgggttctgcctcctcgtcctgcgcctctttctcgggatccacgtcttcctggtcagctgcgcgctgccagacagcgtccttcgcagattcgtagtgcggaccatgtgtgcggtgctagggctcgtggcccggcaggaggactccggactccgggatcacagtgtcagggtcctcatttccaaccatgtgacacctttcgaccacaacatagtcaatttgcttaccacctgtagcaccgtgagtgagagcgaggccgaragcgccacggggcggttccctggggcccagctgaaggcccccctgtccccactcgcgttccscatggaggatactgagccttacccctaaccccgatcctctacccaacatgtcagttttttttttcattttcctcaatatttttyttcttgctttctcttctcctggttcccagcctctactcaatagtccccccagctttgtgtgctggtctcggggcttcatggagatgaatgggcggggggagttggtggagtcactcaagagattctgtgcttccacgaggcttccccccactcctctgctgctattccctgaggaagaggccaccaatggccgggaggggctcctgcgcttcagttcctggccattttctatccaagatgtggtacaacctcttaccctgcaagttcagagacccctggtctctgtgacggtgtcagatgcctcctgggtctcagaactgctgtggtcacttttcgtccctttcacggtgtatcaagtaaggtggcttcgtcctgttcatcgccaactaggggaagcgaatgaggagtttgcactccgtgtacaacagctggtggccaaggaattgggccagacagggacacggctcactccagctgacaaagcagagcacatgaagcgacaaagacaccccagattgcgcccccagtcagcccagtcttctttccctccctcccctggtccttctcctgatgtgcaactggcaactctggctcagagagtcaaggaagttttgccccatgtgccattgggtgtcatccagagagacctggccaagactggctgtgtagacttgactatcactaatctgcttgagggggccgtagctttcatgcctgaagacatcaccaagggaactcagtccctacccacagcctctgcctccaagtttcccagctctggcccggtgacccctcagccaacagccctaacatttgccaagtcttcctgggcccggcaggagagcctgcaggagcgcaagcaagcactatatgaatacgcaagaaggagattcacagagagacgagcccaggaggctgactgagctcaaaggaacaggatggcacccagagccgcaggacggagactgggggcagccctcacccaactcacaacaggctggatgggtgggtggtaaaaagggaaggatgaggctcccccaatgtcacattaaattcatggttttcattcaacaaaaaaaaaaaaaaaaaaaaaaaaaaaaaaaactcgag

SEQ ID NO: 168 - DNA, 1636 bp, Homo sapiens
ggcacgagcgccggagcgcgctagccgcattgcgagccgaacccgggagctggcgccatggtgctgttgcacgtgctgtttgagcacgcggtcggctacgcgctgctggcgctgaaggaagtggaggagatcagtctgctgcagccgcaggtggaggagtccgtgctcaacctgggcaaattccacagcatcgttcgtctggtggccttttgtccctttgcctcatcccaggttgccttggaaaatgccaacgccgtgtctgaaggggttgttcatgaggacctccgcctgctcttggagacccacctgccgtccaaaaagaagaaagtactcttgggagttggggatcccaagattggtgccgcaatacaggaggagttagggtacaactgccagactggaggagtcatagctgagatcctgcgaggagttcgtctgcacttccacaatctggtgaagggtctgaccgatctgtcagcttgtaaagcacagctggggctgggacacagctattcccgtgccaaagttaagtttaatgtgaaccgggtggacaatatgatcatccagtccattagcctcctggaccagctggataaggacatcaataccttctctatgcgtgtcagggagtggtacgggtatcactttccggagctggtgaagatcatcaacgacaatgccacatactgccgtcttgcccagtttattggaaaccgaaggaactgaatgaggacaagctggagaagctggaggagctgacaatggatggggccaaggctaaggctattctggatgcctcacggtcctccatgggcatggacatatctgccattgacttgataaacatcgagagcttctccagtcgtgtggtgtctttatctgaataccgccagagcctacacacttacctgcgctccaagatgagccaagtagcccccagcctgtcagccctaattggggaagcggtaggtgcacgtctcatcgcacatgctggcagcctcaccaacctggccaagtatccagcatccacagtgcagatccttggggctgaaaaggccctgttcagagccctgaagacaaggggtaacaccccaaaatatggactcattttccactccaccttcattggccgagcagctgccaagaacaaaggccgcatctcccgatacctggcaaacaaatgcagtattgcctcacgaatcgattgcttctctgaggtgcccacgagtgtattcggggagaagcttcgagaacaagttgaagagcgactgtccttctatgagactggagagataccacgaaagaatctggatgtcatgaaggaagcaatggttcaggcagaggaagcggctgctgagattactaggaagctggagaaacaggagaagaaacgcttaaagaaggaaaagaaacggctggctgcacttgccctcgcgtcttcagaaaacagcagtagtactccagaggagtgtgaggagaygagtgaaaaacccaaaaagaagaaaaagcaaaagccccaggaggttcctcaggrgratggaatggaagacccatctatctctttctccaaacccaagaaaaagaaatctttttccaaggaggagttgatgagtagcgatcttgaagagaccgctgg

SEQ ID NO: 169 - DNA, 667 bp, Homo sapiens
ggcacgagckmgttttcttttcctctaggcagagaagaggcgatggcggcgatggcatctctcggcgccctggcgctgctcctgctgtccagcctctcccgctgctcagccgaggcctgcctggagccccagatcaccccttcctactacaccacttctgacgctgtcatttccactgagaccgtcttcattgtggagatctccctgacatgcaagaacagggtccagaacatggctctctatgctgacgtcggtggaaaacaattccctgtcactcgaggccaggatgtggggcgttatcaggtgtcctggagcctggaccacaagagcgcccacgcaggcacctatgaggttagattcttcgacgaggagtcctacagcctcctcaggaaggctcagaggaataacgaggacatttccatcatcccgcctctgtttacagtcagcgtggaccatcggggcacttggaacgggccctgggtgtccactgaggtgctggctgcggcgatcggccttgtgatctactacttggccttcagtgcgaagagccacatccaggcctgagggcggcaccccagccctgcccttgcttccttcaataaacatcacaggacctgggactgcacaggaaaaaaaaaaaaaaactcgrggggggcccggtacccaa

SEQ ID NO: 170 - DNA, 3598 bp, Homo sapiens
  misc_feature (1): n equals a,t,g, or c
  misc_feature (16): n equals a,t,g, or c
  misc_feature (22): n equals a,t,g, or c
  misc_feature (964): n equals a,t,g, or c
ngcggtaccgtcgtgntgtgtngtgtttctgaaagctttgtggtttcggtgagctctcagaccgatttctagcgtccgtgccggggacaggtgtcagaggtcgrctgctgcagacatggcggcctccaccgcggccgggaagcagcggattcccaaagtggccaaggtgaaaaacaaagccccggctgaggtacagataactgctgaacaactcttaagagaggctaaagaaagagaacttgagcttcttccacctccacctcaacagaagatcacagatgaagaagaattaaatgattataaactaaggaaaaggaagacttttgaagataatataagaaaaaacaggactgtgattagtaactggataaaatacgcacaatgggaagaaagcctaaaggagattcaaagggctcgatccatatacgagcgtgctttagatgtagactaccgaaatattacactctggctgaaatacgcagaaatggaaatgaagaatcgccaagtcamccatgctcgaaatatctgggaccgggccataacaacgctgcctcgagttaatcagttctggtacaagtacacgtacatggaggaaatgttgggaaacgttgccggtgcccggcaggtgtttgagcgctggatggagtggcagcctgaggagcaagcctggcactcctacatcaactttgagctgagatacaaagaggtggatcgggcccgcaccatttatgagcgakttgtcctcgtgcaccctgatgttaagaactggatcaagtatgcccgctttgaagaaaaacatgcttattttgcccatgcacggaaagtgtatgagagagctgtggaattctttggagatgaacatatggatgagcacctttatgttgcctttgccaagtttgaagaaaatcagaaagagtttgaaagggtacgagtgatttacaagtatgccctggacagaatttcnaaacaagatgcccaagaactctttaaaaattataccatctttgagaagaagtttggtgataggcggggtattgaagatatcattgtgagcaaacggagattccagtacgargaagaagtgaaggcgaatccacacaattatgatgcatggtttgattacttgcgcttggtagaaagtgacgcagaagctgaagccgtgagagaagtctatgaaagggccattgccaatgtcccacccattcaggagaagaggcactggaagcgctacatttatctttggatcaactatgcactctatgaagaattggaggcaaaggatcctgagaggacaagacaggtgtatcaagcctctttggaactaattcctcacaaaaagttcacatttgscaaaatgtggatactgtatgcacagtttgaaatacgacagaagaatctgtcattagccagaagagcattgggaacttccataggcaaatgtccaaagaacaaattatttaaagtttacatagaattggagctacagcttcgagaatttgacagatgccggaagctttatgaaaagttcctggaatttggacctgaaaattgtacctcatggattaaattcgctgaattagagacaatccttggtgatattgacagagcacgggcaatctatgaattagccatcagtcagccacgtttagacatgccagaggtgctttggaaatcatatattgattttgaaattgagcaggaagaaacagaaagaacacgaaacctttaccggcggttgcttcaacggacgcagcatgtcaaggtatggatcagctttgctcagtttgagttgtcttcaggaaaagaaggaagtttgactaaatgcagacaaatttatgaagaagctaacaaaaccatgcgaaactgtgaagaaaaggaagagagacttatgctgctggaatcttggcgaagttttgaagaagaatttggaacagcttcagataaggagagagtagacaaactcatgccagagaaagtcaagaagagaagaaaggtccagactgatgatgggtctgatgcaggctgggaagaatactttgattacatctttccagaagatgctgccaaccaacctaacctcaaactcctggccatggccaaactgtggaagaaacagcagcaggaaaaggaggatgctgagcaccatccagatgaggacgtcgatgagagtgaatcctgatctttttttcatagacaaatgttttgttatttttataaattaattgtttggaactcttgtgactcctggaagttcttatatatttcaccagtaagaaattgattggtatctttgatggctactttttaagttattttttaaatgctcttgggttagctaggggtagggattgcaagtaaaggacttttttaactgctggatttgtttttccaacygagtccaaacttttctaatgtctgtccacatcatgcattaggaaatgtaattaaggtaacattctacagttacttttcatgtcatacccataaagatagtttatgcattcatctgaaatgtgtaactttttcatgtcttcagagtcacagacttgagttcatttcccagctactgccactcatgattatataacttaattttcattttcctcattcacaaaatgggccaatagtttgacagctcattttgaagatwacattataaaaggaatatacctggtgggtgcatagtaagtgctcagtaaattgtttgttctaagccacttttaaaaatggtttcattccttgtagaattgaatgcgagtggattaatwatttaccttactttcttactagtgtccagttatattgttttttagaacaacacttggaaaataatttgcagtgattatatttctgaacaaggttcagaaaacattgtttactaagaatttagtctaataattycagttaggcgctcatcagttctccagagtggttgagtttgtaataccttgtttaaagaataatggcttgttcacgtgtgtgctatgaaaaatgatgtcccatgttcacataaatttgggaaattctggactaagacttaagtctcgttaatcaaatctctttatagttaggcttctgtacattatgtatctccagtagcaatgttgccatattatttatttcccaaacttagtggacaatggagtcatttctacctagagtaccagtaaacatctcccagtgtgctatagtagaaaatgtctactcctcactgctgacatgttaaacttactcttggtttagagcatgtgtagaaacacctaaggtagctctatgctaaataatgaagagtagcacaagaatgaatgtatttgctgatacgttgctcacattctcaagcaaaaattcaactgcattaaccgatctgagagttttcctttaacctggactgtgtttctcaagcacattttttctttgttcactgcccaaggactagaactgtatttttaaggttgttttcccctaaaaggacctttagtaagcaaatttattattaaatgtgcacatcttattcacccaagggaataaaagctacttcgtaatgttgttactaaattttatcttgaaaataaataacagtgtttgaggacaraaaaaa

SEQ ID NO: 171 - DNA, 940 bp, Homo sapiens
  misc_feature (8): n equals a,t,g, or c
  misc_feature (12): n equals a,t,g, or c
  misc_feature (919): n equals a,t,g, or c
  misc_feature (935): n equals a,t,g, or c
  misc_feature (938): n equals a,t,g, or c
gtggggtntctntgtgttctcccactgaccacgctttctttagtgactcctgattgcctcctcaagtcgcagacactatgctgcctcccatggccctgcccagtgtatcttggatgctgctttcctgcctcatgctgctgtctcaggttcaaggtgaagaaccccagagggaactgccctctgcacggatccgctgtcccaaaggctccaaggcctatggctcccactgctatgccttgtttttgtcaccaaaatcctggacagatgcagatctggcctgccagaagcggccctctggaaacctggtgtctgtgctcagtggggctgagggatccttcgtgtcctccctggtgaagagcattggtaacagctactcatacgtctggattgggctccatgaccccacacagggcaccgagcccaatggagaaggttgggagtggagtagcagtgatgtgatgaattactttgcatgggagagaaatccctccaccatctcaagccccggccactgtgcgagcctgtcgagaagcacagcatttctgaggtggaaagattataactgtaatgtgaggttaccctatgtctgcaagttcactgactagtgcaggagggaagtcagcagcctgtgtttggtgtgcaactcatcatgggcatgagaccagtgtgaggactcaccctggaagagaatattcgcttaattcccccaacctgaccacctcattcttatctttcttctgtttcttcctccccgctgtcatttcagtctcttcattttgtcatacggcctaaggctttaaagagcaataaaatttttagtctgcaaaaaaaaaaaaaaaaaaaaaaaaaaaaaaaaaaaaaaaaaaaaaaaaaaaaaaaaaaaaaaaaaaaaaaaaaaaaaaaaaaaaaaaaaaaaaanaaaaaaaaaaaaaaanaanaa

SEQ ID NO: 172 - DNA, 1458 bp, Homo sapiens
gtaacagacggcggcagtgcgagaaagccgaagatggcggtccccgcggcgctgatcctacgggagagccccagcatgaagaaagcagtgtcactgataaatgcaatagatacaggaagatttccacggttgctcactcggattcttcaaaaacttcacctgaaggctgagagcagtttcagtgaagaagaggaagaaaaacttcaagcggcattttctctagagaaacaagatcttcacctagttcttgaaacaatatcatttattttagaacaggcagtgtatcacaatgtgaagccagcagctttgcagcagcaattagagaacattcatcttagacaagacaaagctgaagcatttgtcaatacktggtcttctatgggtcaagaaacagttgaaaagttccggcagagaattctggctccctgtaagctagagacygttggatggcagcttaaccttcagatggctcactctgctcaagcaaaactaaaatctcctcaagctgtgttacaactcggagtgaacaatgaagattcaaagagcctggagaaagttcttgtggaattcagtcacaaggagttgtttgatttctataacaagctagagactatacaagcacagctggattcccttacatgatgttttcgaagactgtttttttcatcacgctcctgccacctcattattttgcattgaagatacattgccaggttgtgttttctgaaggattcagtgacttgctttctgtaaattatatggcttatcacttcttagacaaataacaaccaatagagatcattgttaagaatactgaggttctaatatactttctttagttctgtgagccaacagtaattattaagaacactttccctttaaaggaaacaaaagtgaataccatattgtttttactgtcatagtgttgctttcttgcctgtcctgcttagtttttacttgctggatgataccataatgtatcaaggagcgtccatggatacaagataagatgtgtaccttagtagaatacagagctttggtaattacatgaataaaattaagaaaatagccatatacaatcaaatacactatggcatttttatttgaatatgatgagtatattttgcttcggaaataatataggaaggaaatgtaaaatagtgagtagtatggtatcagttaattccagtctgagcttctctgtcaacttcagtttctctctcagtttaatgatttaataatagtccaggtttttgtgtgtttttctttatactgcaaattaataatgattcactttatagtttgggagacagaatcaggtcttgaataaaataattgtaatgagtgctaaatgggcaccattattcgaatcagataccttttatattctctttccataaatacgttgatttctgtcaataaaatttttgtgtcttaggaaaaaaaaaaaaaagtcga

SEQ ID NO: 173 - DNA, 2709 bp, Homo sapiens
  misc_feature (2595): n equals a,t,g, or c
  misc_feature (2622): n equals a,t,g, or c
  misc_feature (2659): n equals a,t,g, or c
  misc_feature (2670): n equals a,t,g, or c
ggggctgcgagagaggaagctctttcgcggcgctacggcgttggcaccagtctctagaaaagaagtcagctctggttcggagaagcagcggctggcgtgggccatccggggaatgggcgccctcgtgacctagtgttgcggggcaaaaagggtcttgccggcctcgctcgtgcaggggcgtatctgggcgcctgarcgcggcgtgggagccttgggagccgccgcagcagggggcacacccggaaccggcctgagcgcccgggaccatgaacggggaggccatctgcagcgccctgcccaccattccctaccacaaactcgccgacctgcgctacctgagccgcggcgcctctggcactgtgtcgtccgcccgccacgcagactggcgcgtccaggtggccgtgaagcacctgcacatccacactccgctgctcgacagtgaaagaaaggatgtcttaagagaagctgaaattttacacaaagctagatttagttacattcttccaattttgggaatttgcaatgagcctgaatttttgggaatagttactgaatacatgccaaatggatcattaaatgaactcctacataggaaaactgaatatcctgatgttgcttggccattgagatttcgcatcctgcatgaaattgcccttggtgtaaattacctgcacaatatgactcctcctttacttcatcatgacttgaagactcagaatatcttattggacaatgaatttcatgttaagattgcagattttggtttatcaaagtggcgcatgatgtccctctcacagtcacgaagtagcaaatctgcaccagaaggagggacaattatctatatgccacctgaaaactatgaacctggacaaaaatcaagggccagtatcaagcacgatatatatagctatgcagttatcacatgggaagtgttatccagaaaacagccttttgaagatgtcaccaatcctttgcagataatgtatagtgtgtcacaaggacatcgacctgttattaatgaagaaagtttgccatatgatatacctcaccgagcacgtatgatctctctaatagaaagtggatgggcacaaaatccagatgaaagaccatctttcttaaaatgtttaatagaacttgaaccagttttgagaacatttgaagagataacttttcttgaagctgttattcagctaaagaaaacaaagttacagagtgtttcaagtgccattcacctatgtgacaagaagaaaatggaattatctctgaacatacctgtaaatcatggtccacaagaggaatcatgtggatcctctcagctccatgaaaatagtggttctcctgaaacttcaaggtccctgccagctcctcaagacaatgattttttatctagaaaagctcaagactgttattttatgaagctgcatcactgtcctggaaatcacagttgggayagcaccatttctggatctcaaagggctgcattctgtgatcacaagaccactccatgctcttcagcaataataaatccactctcaactgcaggaaactcagaacgtctgcagcctggtatagcccagcagtggatccagagcaaaagggaagacattgtgaaccaaatgacagaagcctgccttaaccagtcgctagatgcccttctgtccagggacttgatcatgaaagaggactatgaacttgttagtaccaagcctacaaggacctcaaaagtcagacaattactagacactactgacatccaaggagaagaatttgccaaagttatagtacaaaaattgaaagataacaaacaaatgggtcttcagccttacccggaaatacttgtggtttctagatcaccatctttaaatttacttcaaaataaaagcatgtaagtgactgtttttcaagaagaaatgtgtktcataaaaggatatttatatctctgttgctttgactttttttatataaaatccgtgagtattaaagctttattgaaggttctttgggtaaatattagtctccctccatgacactgcagtattttttttaattaatacaagtaaaaagtttgaattttgctacatagttcaatttttatgtctcttttgttaacagaaaccacttttaaaggatagtaattattcttgtttataacagtgccttaaggtatgatgtatttctgatggaagccattttcacattcatgttcttcatggattatttgttacttgkctaarawgcaatttgattttatgaagtatataccctttacccaccagagacagtacagaatccctgccctaaaatcccaggcttaattgccctacaaagggttattaatttaaaactccattattaggattacattttaaagttttatttatgaattccctttaaaaatgatatttcaaaggtaaaacaatacaatataaagaaaaaaataaatatattaataccggcttcctgtccccatttttaacctcagccttccctactgtcaccaacaaccaagctaaataaagtcaacagcctgatgtgtatctttctgtccctttcttcctgcttatatttaggaacatatgctcatttgagaaaggntctttctgcatattattattataattntacatcatactgcaacctgctttttgcatttaatagnacaggcttccnggtcaggtatgggtctaacttacccttttacttggtggc

SEQ ID NO: 174 - DNA, 1013 bp, Homo sapiens
ggtgacatcccagtgccccgcgtgcaggcaaggcacacctgaagcgtgccatcctggggcaggaggaggcgctgcggctgcacgccctgtgccgcgtcctgcgcgaggtggacctgcttcgggctgtgatctcccagacgctgcagcgctcactggccaagtatgcggagctcgaccgtgaggatgacttctgtgaggctgccgaggccccggacatccagcctaagacccaccagaagccagaggccaggatgccacgcctgtcccaggggaaggggcctgacatcttccatcggctggggcccctgtctgtgttctcagccaagaaccggtggcggctggtggggcccgtccacctgacccgaggagagggcggctttggcctcacgcttcggggagactcgcctgtcctcatcgctgccgtcattccagggagccaggccgcggcggctggcctgaaggagggcgactacattgtgtcagtgaatgggcagccatgcaggtggtggagacacgcggaggtggtgacggagctgaaggctgcgggagaggcgggcgccagcctgcaggtggtgtcgctgctgcccagctctagactgcccagcttgggggaccgccggcccgtcctgctgggccccagggggcttctaaggagccagagggagcatggttgcaagaccccggcatccacgtgggccagtccccgggccctcctcaactggagccgaaaggcccagcagggcaagactggaggctgccccagccctgtgccccagtgaagccagctccggcctcatccttgaagcacccagggtggccgtgagggccaggatccctgcacgcctcagccctggctccagctggcagcaagcaccgagcatgccctccccacccagaggacctccgggcaatgcctgtcccgcctcatgctggaggctgcctcgggcacctgcctgcccattaaagactggtcagacctgaaaaaaaaaaaaaaaaaaaaaaaaaaaaaaaaa

SEQ ID NO: 175 - DNA, 1697 bp, Homo sapiens
gcgtccgatagaaggggctacagctcacgcatcgtgggtggaaacatgtccttgctctcgcagtggccctggcaggccagccttcagttccagggctaccacctgtgcgggggctctgtcatcacgcccctgtggatcatcactgctgcacactgtgtttatgacttgtacctccccaagtcatggaccatccaggtgggtctagtttccctgttggacaatccagccccatcccacttggtggagaagattgtctaccacagcaagtacaagccaaagaggctgggcaatgacatcgcccttatgaagctggccgggccactcacgttcaatgaaatgatccagcctgtgtgcctgcccaactctgaagagaacttccccgatggaaaagtgtgctggacgtcaggatggggggccacagaggatggagcaggtgacgcctcccctgtcctgaaccacgcggccgtccctttgatttccaacaagatctgcaaccacagggacgtgtacggtggcatcatctccccctccatgctctgcgcgggctacctgacgggtggcgtggacagctgccagggggacagcggggggcccctggtgtgtcaagagaggaggctgtggaagttagtgggagcgaccagctttggcatcggctgcgcagaggtgaacaagcctggggtgtacacccgtgtcacctccttcctggactggatccacgagcagatggagagagacctaaaaacctgaagaggaaggggacaagtagccacctgagttcctgaggtgatgaagacagcccgatcctcccctggactcccgtgtaggaacctgcacacgagcagacacccttggagctctgagttccggcaccagtagcaggcccgaaagaggcacccttccatctgattccagcacaaccttcaagctgctttttgttttttgtttttttgagatggagtctcgctctgttgcccaggctggagtgcagtggcgaaatccctgctcactgcagcctccgcttccctggttcaagcgattctcttgcctcagcttccccagtagctgggaccacaggtgcccgccaccacacccaactaatttttgtatttttagtagagacagggtttcaccatgttggccaggctgctctcaaacccctgacctcaaatgatgtgcctgcttcagcctcccacagtgctgggattacaggcatgggccaccacgcctagcctcacgctcctttctgatcttcactaagaacaaaagaagcagcaacttgcaagggcggcctttcccactggtccatctggttttctctccaggggtcttgcaaaattcctgacgagataagcagttatgtgacctcacgtgcaaagccaccaacagccactcagaaaagacgcaccagcccagaagtgcagaactgcagtcactgcacgttttcatctctagggaccagaaccaaacccaccctttctacttccaagacttattttcacatgtggggaggttaatctaggaatgactcgtttaaggcctattttcatgatttctttgtagcatttggtgcttgacgtattattgtcctttgattccaaataatatgtttccttccctcataaaaaaaaaaaaaaaaaaaaaaaaaaaaaaaaaaaaaaaaaaaaaaaaaaaaaaaaaaaaaaaaaaaaaaaaaaaaa

SEQ ID NO: 176 - DNA, 1409 bp, Homo sapiens
acaatttacacaggaaacagctatgaccatgattacgccaagctcgaaattaaccctcactaaagggaacaaaagctggagctccaccgcggtggcggccgctctagaactagtggatcccccgggctgcaggaattccgctgctggcctggggttgtggttgaggccgggtctccgctcctgtgcccgggaagatggtgctaggtggttgcccggttagttacttacttctgtgcggccaggcggctttgctgctggggaatttacttctgctgcattgtgtgtctcggagccactcgcaaaatgcgaccgctgagcctgagctcacatccgctggcgccgcccagccggagggccccgggggtgctgcgagctgggaatatggcgacccccactctccggtcatcctctgctcttacctacctgatgaatttatagaatgtgaagacccagtggatcatgttggaaatgcaactgcatcccaggaacttggttatggttgtctcaagttcggcggtcaggcctacagcgacgtggaacacacttcagtccagtgccatgccttagatggaattgagtgtgccagtcctaggacctttctacgagaaaataaaccttgtataaagtataccggacactacttcataaccactttactctactccttcttcctgggatgttttggtgtggatcgattctgtttgggacacactggcactgcagtagggaagctgttgacgcttggaggacttgggatttggtggtttgttgaccttattttgctaattactggagggctgatgccaagtgatggcagcaactggtgcactgtttactaaaaagagctgccatcatggcccagggaggcgggtgaaagctccgtcttctgaattcatctctacaggctcaaaactcctctttgatatcagacctgatgttattttccttcttttggagggcatttgtttggttaagaaggcttctttggactttggaatttcaacccagattttaccttgcagacggaatgacaagcaaaaagtgttgtggggaatcaaatttgttcctttcctcatgcacaaaacataaaggatagtggcgagtttacaagctgtggatgggtttccatagtcttcctttctgtacattgctatatcttcagtcctttggagcaagtggacctaacaagttgagcaaaatgaatatttggatccatgttcctcttgtgaccctgagtcttcatgcaaggagatctgaagctgaacaatgaaaatcttcagcagaaatagaaatggccgtggattgtaatacacactgaaattctgactttctgaatttaaatgtagaataaattttaccaacttggaaaaaaaaaaaaaaaaaaaaaaaaaaaaaaaaaaaaactcgag

SEQ ID NO: 177 - DNA, 1503 bp, Homo sapiens
tgccacatcaccggggtttcttattttagtgttttgttttcaagtttgggtgctttatttccattctctaaaagtaagtttcttgctcttacgagagttagtgttccttttgaacccaggtgttccacctgacagtgtttgtctttcatagactttccagaatagacatagtcaagatcagacacgtgagcttctctctcattttaatgtgaggaaaatcatctttcagagacaaggcaccgcttagaaatgtatgtccaggtatgaaagaacctttttaaaatggctggttgttccagatccagatttctctgcacactggacttcgtagagtaagtgtggtagacaaagagactacactgcacaaccaccagtgaatatcattgctaagaagactttgggtcgtgtttctcagccactctcacagcttttgtagacttatttgattttgaaacaagcagttagctaaatctattttccttttatgcatatatgttaattggctcaacttaatatggtgttcttacagaatatgagcccatttgaaataaggttttaggcaattttgctgttggctctgatttgtatatagcaaatttaaagttacagagtgtttcctagatagaagattagttcatttggttcattttgtctttgaagcaagccaagctcatgagccagttggttatttgtcataaatgaacacccatcactatatgctatgttgaggggaggcaagtctgatcttcgaataattgataaagtttaatatctttgtagccaaaatacaatttgcaaaccctaactccagatgtgtcgtatgaatcttgacaaccaggtcttgagatttgttttactgattgccaatcaggtatattatttgtgatgttcgtgggagcatgcaaattagaagacagtgttgtgggagttcctcagtattgaattacatgtgtgcactcaggcctgccagtcactgaattctgacttgtaaagggtttaacctgctgttccaatcattgaggaccaatttgctttttgataagattggaaaacatttatggagactttcccagttaaatctatgacagtgtcccacttaaatagtgcaatttagtatattctcagataactgcaacacaaaattgaaatgtgccagtatgtcatctttctacctggaagatactgtatatttggaaagtttatgcttctctcaataaatacatgttattaaataagccatatcacagtttaagaaattgtatatactttatcatatgccctttcagaaaccaggtattttgcatatgattgattttagaaagattttgaagctggggtttgtccatgttaattaagatcaaagtatatatatatatatatatatgtgctgtatttgcaactttcacattgtaatttcctatacacttattaaagtattgttttgccatgtggtttattaaataaaaatgtacagtctcttaaaaaaaaaaaagaaaaaaaaaa

SEQ ID NO: 178 - DNA, 1378 bp, Homo sapiens
  misc_feature (3): n equals a,t,g, or c
  misc_feature (82): n equals a,t,g, or c
aanctgccccgcctgcaggtaccggtccggaattcccgggtcgacccacgcgttcgcccacgcgtccggggaatgccatagntaattcaccagcagtaatcctttaataactggcagagcactttattcttctggtgagctccctgaatatttatttttctgattataaattttctatattagtagcattttttaattattacttcttcactatagagcatttacttttagtctctagatgtatattttggaatgctrtacttggcataacatagattaaaatcataatgcatgactaaaaactccttggatttatttcccattttaaaatttttagcggtaagttcagatttataatctttctctagacttccatggtctgaatgttgcctgctgaagtagcaacctaaaaagtatcccctgcttatgcttctccagttggccctccatgtccataggcttcgcatctgtgattcagcccactgtgggtcaaaaatatttggggaaaaaaatggatggttgcgcctttgctgaacatgtacaaacttttttttgtcattaaacaatatagtataacaactatttacaaagcatttacattgtattagctattataggtaatctagagatgatttaaagtgtatggtaggatgtgcacaggttatatgcaaatactacaccattttctataagggacttgaacatcatggactttagtatcctagggggttcttggaacccatcacccataggggcaccataggacaactatagtaccgtgtttatttcctattaattcaggttccgtttagagtctaaaactaaaacctaatcatttagtcacagtgtaaaaacaaatggaaataacagctcaaatcttcaaaatattactatagcattatgtttaaaataatctacaacaaaaatgtaccattttcaagcagtactacattaggagcccttttatagaaaataatttcttctttacccccgttccagtgtgaatctagtattctgttaacatttgtgtggcatttggagtttgtcatccccattgaagggagagccttctcagacatgaagcaagggaaacatactgaatagttttacacaaatttgatctggcttccatttgtccccctcatttcccaaatgtttaaatgtattggatttggattctcaatgtataagttgccttatctgttaatgtctatcttctgtctctttaattttgtatatctgctgttttgcttttggatacattttctaattagaagtcacatgataaatataatcagtatagtaataataccataatgtgcacatactcaataaataaatgactgcattgttgtaaaaaaaaaaaaaaaaaaaaaaa

SEQ ID NO: 179 - DNA, 2251 bp, Homo sapiens
  misc_feature (2020): n equals a,t,g, or c
  misc_feature (2050): n equals a,t,g, or c
ccgaaagagaaaacaggccgcgcgggcggcagaggagccgggcgccgcaatggacgtgcgggcgctgccgtggctgccgtggctgctgtggctgctgtgccggggcggcggcgatgcggactcccgcgcccccttcaccccgacctggccgcggagccgcgagcgtgaagccgccgccttccgggaaagtcttaatagacatcgatacttgaattctttatttcccagtgaaaactccaccgccttctatggaataaatcagttttcctatttgtttcctgaagagtttaaagccatttatttaagaagcaaaccttccaagtttcccagatactcagcagaagtacatatgtccatccccaatgtgtctttgccgttaagatttgactggagggacaagcaggttgtgacacaagtgagaaaccagcagatgtgtggaggatgctgggccttcagcgtggtgggggcagtggaatctgcttatgcaataaaggggaagcccctggaagacctaagtgtccagcaggtcattgactgttcgtataataattatggctgcaatggaggctctactctcaatgctttgaactggttaaacaagatgcaagtaaaactggtgaaagattcagaatatccttttaaagcacaaaatggtctgtgccattacttttctggttcacattctggattttcaatcaaaggttattctgcatatgacttcagtgaccaagaagatgaaatggcaaaagcacttcttacctttggccctttggtagtcatagtagatgcagtgagctggcaagattatctgggaggcattatacagcatcactgctctagtggagaagcaaatcatgcagttctcataactgggtttgataaaacaggaagcactccatattggattgtgcggaattcctggggaagttcttggggagtagatggttatgcccatgtcaaaatgggaagtaatgtttgtggtattgcagattccgtttcttctatatttgtgtgacatgttgggcagatcaagagacagctacaaaaatgaaggttttcataatgcaatgtaacatagtacttcaaagtattattcaacttcaagtttcagcaactacctacaaaagattctaaggcctagtagtatttaaactaagtttcagaatgttcccttcttgtagagagatggacaaccaaagtcagtgggacaaactccagcacagaagcctgcgaggaagcctatggaatagtttcctgtcctgagacgaaattcagattaggagatattttaggcccctgcaactggggaaggctactgtttgtttttgtttgcttattatttatttgtttgtttattgtgagatatttcaggtgggatcaaagaggtcataagaatttattttcttttgtggggtgtaactactagctttagattacccctatacacaagaatggccaacctaaaattatgtgtgtcttgtacagttagttatattagcagccctctgagatggcgtatctatcggaaggatttcaaacaccaattgctttacctgaacaaatggtgcttaccctttgaacagcagagtgaccaygtagaaggaaggaaaagggcaaaatcgcttcagttaaactgaaattaaatgaacaataaggcaactatataagtaacttctagtagcattgcctgagagacaaattattgtttgataattttcattgtgaataggaatccaatagatcatattgcttactttgttctttttatactatagaataatattttgttctctagtatatcaaaataccaaaatattatctcatattttctccctctttctcttactctttaccaagttttcctggtggcttggcttccctgactaaagaattaagtctcatttttactttccatktctattttcttaccacttggttggctccctttgtctctgtactttacsacgataggatscactcttcttctccttaatcataacacactctatcaagccactcntagctgggactaacactgtggttcagactngtcagttccgcagcttctgctcactgatgtcttggacctgcgtcctgacgactgacaggcactgagctatggccaaggtgtcggtgatctcgccgggttctgaaaggtggctcagaaaactgtaggcatgagtctttaccaatcgagaattgggactagactagtagacctagtcgctttcggtgacctgtccgtacgttt

SEQ ID NO: 180 - DNA, 1000 bp, Homo sapiens
  misc_feature (20): n equals a,t,g, or c
ctatagatcatagaggaatngtagctgcagtacggtccgaattcccgggtcgacccacgcgtccggggaaggcgggagacagcgcagtttgaatcgcggtgcgacgaaggagtaggtggtgggatctcaccgtgggtccgattagccttttctctgccttgcttgcttgagcttcagcggaattcgaaatggctggcggtaaggctggaaaggactccggaaaggccaagacaaaggcggtttcccgctcgcagagagccggcttgcagttcccagtgggccgtattcatcgacacctaaaatctaggacgaccagtcatggacgtgtgggcgcgactgccgctgtgtacagcgcagccatcctggagtacctcaccgcagaggtacttgaactggcaggaaatgcatcaaaagacttaaaggtaaagcgtattacccctcgtcacttgcaacttgctattcgtggagatgaagaattggattctctcatcaaggctacaattgctggtggtggtgtcattccacacatccacaaatctctgattgggaagaaaggacaacagaagactgtctaaaggatgcctggattccttgttatctcaggactctaaatactctaacagctgtccagtgttggtgattccagtggactgtatctctgtgaaaaacacaattttgcctttttgtaattctatttgagcaagttggaagtttaattagctttccaaccaaccaaatttctgcattcgagtcttaaccatatttaagtgttactgtggcttcaaagaagctattgattctgaagtagtgggttttgattgagttgactgtttttaaaaaactgtttggattttaattgtgatgcagaagttatagtaacaaacatttggttttgtacagacattatttccactctggtggataagttcaataaaggtcatatcccaaaaaaaaaaaaaaaaaaaaaaaaaaaaaaaaammaaaaaaggggggggccccc

SEQ ID NO: 181 - DNA, 1429 bp, Homo sapiens
  misc_feature (761): n equals a,t,g, or c
  misc_feature (1407): n equals a,t,g, or c
  misc_feature (1420): n equals a,t,g, or c
actgggactcccagcagagcccaccagccagccctggcccaccccccagcctccagagaagccccgcacgggctgtctgggtgtccgccatccagggtctggcagagcctctgagatgatgcatgatgccctcccctcagcgcaggctgcagagcccggccccacctccctgcgcccttgaggggccccagcgtctgcagggtgacgcctgaracagcaccactgctgaggagtgaggactgtcctcccacagacctgcagtgaggggccctccatgcgcagatgaggggccactgacccacctgcgcttctgctggaggaggggaagctgggcccaaaggccmgsgraggcagcgtgggctctgccaatgtgggctgcccctcgcacacagggctcacagggcaggccttgctggggtccagggctgttggaggaccccgagggctgaggagcagcaggacccgcctgctcccatcctcacccagatcaggaaccagggcctccctgttcacggtgacacaggtcagggctcagagtgaccctcrgctgtcacctgctcacagggatgctggtggctggtgagaccccgcactgcasacgggaatgcctaggtcccttcccgacccagccagctgcagggcacggggacctggatagttaagggcttttccaaacatgcatccatttactgacacttcctgtccttgttcatggagagctgttcgctcctcccagatggcttcggagggccgcaggscanccttggaccctggtgacctcctgtmamtcactgaggccatcagggccctgccccaggcctggacgggccctccttccctcctgtgccccagctgccaggyggccctggggaggggtggtgtggtgttgggaaggggtcctgcagggggaggaggacttggagggtctgggggcagctgtcctgaaccgactgaccctgaggaggccgcttagtgctgctttgcttttcatcaccgtcccgcacagtggacggaggtccccggttgctggtcaggtccccatggcttgttctctggaacctgactttagatgttttgggatcaggagcccccaacacaggcaagtccaccccataataaccctgccagtgccagggtgggctggggactctggcacagtgatgccgggcgccaggacagcagcactcccgctgcacacagacggcctaggggtggcgctcagaccccaccctacgctcatctctggaaggggcagccctgagtggtcactggtcagggcagtggccaagcctgctgtgtccttcctccacaaggtccccccaccgctcagtgtcagcgggtgacgtgtgttcttttgagtccttgtatgaataaaaggctggaaacctaaaaaaaaaaaaaaaaaangggggccctctanagggtccaa

SEQ ID NO: 182 - DNA, 2725 bp, Homo sapiens
  misc_feature (2713): n equals a,t,g, or c
taacagggcaaaaaaagggctggaaacttcgctatcatggagatccaatgccctgccctaaggaagacactcccaattctgtttgggagcctgcgaaggtgcttgtgtttgtcagacaaatacagccaggcctgccaccccttaggctccaaagtccggaggtgcagaaagccaggaccaagagacaggcagctcaccagggtggacaaatcgccagagatgtggtgcattgtcctgttttcacttttggcatgggtttatgctgagcctaccatgtatggggagatcctgtcccctaactatcctcaggcatatcccagtgaggtagagaaatcttgggacatagaagttcctgaagggtatgggattcacctctacttcacccatctggacattgagctgtcagagaactgtgcgtatgactcagtgcagataatctcaggagacactgaagaagggaggctctgtggacagaggagcagtaacaatccccactctccaattgtggaagagttccaagtcccatacaacaaactccaggtgatctttaagtcagacttttccaatgaagagcgttttacggggtttgctgcatactatgttgccacagacataaatgaatgcacagattttgtagatgtcccttgtagccacttctgcaacaatttcattggtggttacttctgctcctgccccccggaatatttcctccatgatgacatgaagaattgcggagttaattgcagtggggatgtattcactgcactgattggggagattgcaagtcccaattatcccaaaccatatccagagaactcaaggtgtgaataccagatccggttggagaaagggttccaagtggtggtgaccttgcggagagaagattttgatgtggaagcagctgactcagcgggaaactgccttgacagtttagtttttgttgcaggagatcggcaatttggtccttactgtggtcatggattccctgggsctctaaatattgaaaccaagagtaatgctcttgatatcatcttccaaactgatctaacagggcaaaaaaagggctggaaacttcgctatcatggagatccaatgccctgccctaaggaagacactcccaattctgtttgggagcctgcgaaggcaaaatatgtctttagagatgtggtgcagataacctgtctggatgggtttgaagttgtggagggacgtgttggtgcaacatctttctattcgacttgtcaaagcaatggaaagtggagtaattccaaactgaaatgtcaacctgtggactgtggcattcctgaatccattgagaatggtaaagttgaagacccagagagcactttgtttggttctgtcatccgctacacttgtgaggagccatattactacatggaaaatggaggaggtggggagtatcactgtgctggtaacgggagctgggtgaatgaggtgctgggcccggagctgccgaaatgtgttccagtctgtggagtccccagagaaccctttgaagaaaaacagaggataattggaggatccgatgcagatattaaaaacttcccctggcaagtcttctttgacaacccatgggctggtggagcgctcattaatgagtactgggtgctgacggctgctcatgttgtggagggaaacagggagccaacaatgtatgttgggtccacctcagtgcagacctcacggctggcaaaatccaagatgctcactcctgagcatgtgtttattcatccgggatggaagctgctggaagtcccagaaggacgaaccaattttgataatgacattgcactggtgcggctgaaagacccagtgaaaatgggacccaccgtctctcccatctgcctaccaggcacctcttccgactacaacctcatggatggggacctgggactgatctcaggctggggccgaacagagaagagagatcgtgctgttcgcctcaaggcggcaaggttacctgtagctcctttaagaaaatgcaaagaagtgaaagtggagaaacccacagcagatgcagaggcctatgttttcactcctaacatgatctgtgctggaggagagaagggcatggatagctgtaaaggggacagtggtggggcctttgctgtacaggatcccaatgacaagaccaaattctacgcagctggcctggtgtcctgggggccccagtgtgggacctatgggctctacacacgggtaaagaactatgttgactggataatgaagactatgcaggaaaatagcaccccccgtgaggactaatccagatacatcccaccagcctctccaagggtggtgaccaatgcattaccttctgttccttatgatattctcattatttcatcatgactgaaagaagacacgagcgaatgatttaaatagaacttgattgttgagacgccttgctagaggtagagtttgatcatagaattgtgctggtcatacatttgtggtctgactccttggggtcctttccccggagtacctattgtagataacactatgggtggggcactcctttcttgcactattccacagggataccttaattctttgtttcctctttacctgttcaaaattccatttacttgatcattctcagtatccactgtctatgtacaataaaggatgtttataagcaaaaaaaaaaaaaaaaaaaaaaaaaaaaaaaaaaaaaaaaaaaaaaaanaaaaaaaaaaag

SEQ ID NO: 183 - DNA, 1751 bp, Homo sapiens
  misc_feature (344): n equals a,t,g, or c
  misc_feature (416): n equals a,t,g, or c
  misc_feature (1617): n equals a,t,g, or c
gggggcggcaggttgcggcggcgccggagcgggtctccaggctggcgagcgcccaggacaggcatgttgttgggactggcggccatggagctgaaggtgtgggtggatggcatccagcgtgtggtctgtggggtctcagagcagaccacctgccaggaagtggtcatcgcactagcccaagcaataggccagactggccgctttgtgcttgtgcagcggcttcgggagaaggagcggcagttgctgccacaagagtgtccagtgggcgcccaggccacctgcggacagtttgccagcgatgtccagtttgtcctgaggcgcacagggcccagcctagctgggangccctcctcagacagctgtccacccccggaacgctgcctaattcgtgccagcctccctgtaaagccacgggntgcgctgggctgtgagccccgcaaaacactgacccccgagccagcccccagcctctcacgccctgggcctgcggcctgtgaacacccacaccaggctgctgcacagacctgcggggcctggagctcagggtgcagaggaatgctgaggagctgggccatgaggccttctgggagcaagagctgcgccgggagcaggcccgggagcgagagggacaggcacgcctgcaggcactaagtgcggccactgctgagcatgccgcccggctgcaggccctggacgctcaggcccgtgccctggaggctgagctgcagctggcagcggaggcccctgggcccccctcacctatggcatctgccactgagcgcctgcaccaggacctggctgttcaggagcggcagagtgcggaggtgcagggcagcctggctctggtgagccgggccctggaggcagcagagcgagccttgcaggctcaggctcaggagctggaggagctgaaccgagagctccgtcagtgcaacctgcagcagttcatccagcagaccggggctgcgctgccaccgcccccacggcctgacaggggccctcctggcactcaggtcggagtggttctggggggaggctgggaggtgaggacctggcccarccccactccaagctgacttcccaacccacagggccctctgcctcagccagagaggagtccctcctgggcgctccctctgagtcccatgctggtgcccagcctaggccccgagggtatgtctgtgccccacctccccctggggcaccgggccctcctgtggctgcagccactgcagcctgtgtcctcccgcagtggcccccatgacgcagaactcctggaggtagcagcagctcctgccccagagtggtgtcctctggcagcccagccccaggctctgtgacagcctagtgagggctgcaagaccatcctgcccggaccacagaaggagagttggcggtcacagagggctcctctgccaggcagtgggaagccctgggtttggcctcaggagctgggggtgcagtgggggactgccctagtccttgccaggtcgccagcaccctggagaagcatggggcgtagccagctcggaacttgccaggccccaaaggccacgactgcctgttggggacaggagatgcatggacagtgtgctcaagctgtgggcatgtgcttgnctgcgggagaggtccttcactgtgtgtacacagcaagagcatgtgtgtgccacttcccctaccccaacgtgaaaacctcaataaactgcccgaakyakaaaaaaaaaaaaaaaaaaaaaaaaaaaaaaaaaaaa

SEQ ID NO: 184 - DNA, 2200 bp, Homo sapiens
  misc_feature (2096): n equals a,t,g, or c
  misc_feature (2140): n equals a,t,g, or c
  misc_feature (2157): n equals a,t,g, or c
  misc_feature (2181): n equals a,t,g, or c
  misc_feature (2184): n equals a,t,g, or c
ggcacgagcagcgacatactgaagggcaacttctcaatccgtacagccaagatgcagcagcatgtgtgtgaaaccatcatccgcatctttaaaagacatggagctgttcagttgtgtactccactactgcttccccgaaacagacaaatatatgagcacaacgaagctgccctattcatggaccacagcgggatgctggtgatgcttccttttgacctgcggatcccttttgcaagatatgtggcaagaaataatatattgaatttaaaacgatactgcatagaacgtgtgttcaggccgcgcaagttagatcgatttcatcccaaagaacttctggagtgtgcatttgatattgtcacttctaccaccaacagctttctgcccactgctgaaattatctacactatctatgaaatcatccaagagtttccagcacttcaggaaagaaattacagtatttatttgaaccataccatgttattgaaagcaatactcttacactgtgggatcccagaagataaactcagtcaagtctacattattctgtatgatgctgtgacagagaagctgacgaggagagaagtggaagctaaattttgtaatctgtctttgtcttctaatagtctgtgtcgactctacaagtttattgaacagaagggagatttgcaagatcttatgccaacaataaattcattaataaaacagaaaacaggtattgcacagttggtgaagtatggcttaaaagacctagaggaggttgttggactgttgaagaaactcggcatcaagttacaggtcttgatcaatttgggcttggtttacaaggtgcagcagcacaatggaatcatcttccagtttgtggctttcatcaaacgaaggcaaagggctgtacctgaaatcctcgcagytggaggcagatatgacctgctgattccccagtttagagggccacaagctctggggccagttcccactgccattggggtcagcatagctatagacaagatatctgctgctgtcctcaacatggaggaatctgttacaataagctcttgtgacctcctggttgtaagtkttggtcagatgtctatgtccagggccatcaacctaacccagaaactctggacagcaggcatcacagcagaaatcatgtacgactggtcacagtcccaagaggaattacaagagtactgcagacatcatgaaatcacctatgtggcccttgtctcggataaagaaggaagccatgtcaaggttaagtctttcgagaaggaaaggcagacagagaagcgtgtgctggagactgaacttgtggaccatgtactgcagaaactgaggactaaagtcactgatgaaaggaatggcagagaagcttccgataatcttgcagtgcaaaatctgaaggggtcattttctaatgcttcaggtttgtttgaaatccatggagcaacagtggttcccattgtgagtgtgctagccccggagaagctgtcagccagcactaggaggcgctatgaaactcaggtacaaactcgacttcagacctcccttgccaacttacatcagaaaagcagtgaaattgaaattctggctgtggatctacccaaagaaacaatattacagtttttatcattagagtgggatgctgatgaacaggcatttaacacaactgtgaagcagctgctgtcacgcctgccaaagcaaagatacctcaaattagtctgtgatgaaatttataacatcaaagtagaaaaaaaggtgtctgtgctatttctgtacagctatagagatgactactacagaatcttattttaaccctaaagaactgtcgttaacctcattcaaacagacagaggcttatactggaataatggaatgttgtacattcatcataatttaaaattaaattctaagaagaggctgggtgcagtggctcacacctttaatcccagcactttgggaagccaaggcaggaagactgcttgaaaccaggagtttgagaccagcctgagcaacaaagcaagaccccatctctataaaaactaaaaaaattagttgggcatggtggcacatgcctgtagtcccagctactccanaggctgagatggatcatctgagcctcaggaggttgacgctgcantgactgtgactgcgccnctgactccatctggggcaacagancangaccctgcttaaatac

SEQ ID NO: 185 - DNA, 1987 bp, Homo sapiens
  misc_feature (523): n equals a,t,g, or c
aactgtggcgckttctggtaaagatggacgtccacgatctctttcgccggctcggcgcgggggccaaattcgacacgagacgcttctcggcagacgcagctcgattccagataggaaaaaggaaatatgactttgattcttcggaggtgcttcagggactggacttttttggaaacaagaagtctgtcccaggtgtgtgtggagcatcacaaacacatcagaagccccaaaatggagagaaaaaagaagagagcctaactgaaaggaagagggagcagagcaagaaaaaaaggaagacgatgacttcagaaattgcttcccaagaagaaggtgctactatacagtggatgtcatctgtagaagcaaagattgaagacaaaaaagttcagagagaaagtaaactaacttccggaaagttggagaatctcagaaaagaaaagataaacttcttgcggaataaacacaaaattcacgtccaaggaaccgatcttcctgacccaattgctacatttcagcaacttgnaccaggaatataaaatcaattctcgactacttcagaacattctagatgcaggtttccaaatgcctacgccaatccaaatgcaagccatcccagttatgctgcatggtcgggaacttctggcttctgctccaactggatctggaaaaacattagcttttagcattcctattttaatgcagctgaaacaacccgcaaataaaggcttcagagccctgattatatcaccaacacgagaacttgccagccagattcacagagagttaataaaaatttctgagggaacaggattcagaatacacatgatccacaaagcagcagtggcagccaagaaatttggacctaaatcatctaaaaagtttgatattcttgtgactactccaaatcgactaatctatttattaaagcaagatccccccggaatcgacctagcaagtgttgagtggcttgtagtagacgaatcagataaactgtttgaagatggcaaaactgggttcagagaccagctggcttccattttcctggcctgcacatcccacaaggtccgaagagctatgttcagtgcaacttttgcatatgatgttgaacagtggtgcaaactcaacctggacaatgtcatcagtgtgtccattggagcaaggaattctgcagtagaaactgtagaacaagagcttctctttgttggatctgagaccggaaaacttctggccgtgagagaacttgttaaaaagggtttcaatccacctgttcttgtttttgttcagtccattgaaagggctaaagaactttttcatgagctcatatatgaaggtattaatgtggatgttattcatgcagagagaacacaacaacagagagataacacagtccacagtttcagagcaggaaaaatctgggttctgatttgtacagccttgctagcaagagggattgattttaaaggtgtgaacttggtgatcaactatgactttccaactagctcagtggaatatatccacaggataggtcgaactggaagagcagggaataagggaaaagcaattacatttttcactgaggatgataagccattattaagaagcgttgctaatgttatacagcaggctgggtgtcctgtaccagaatacataaaaggttttcagaaactactaagcaaacaaaagaaaaagatgattaagaaaccattggaaagggagagcattagtacaactccaaaatgtttcttagaaaaagctaaggataaacagaaaaaggtcactggtcagaacagcaagaagaaagtagctcttgaagacaaaagttaaaaacagactttaaaaatactgtcccagaaatgtaattttatgatcccagcatgaatgttattttcatggaatacttgaagtcttacagtcacctgtaccaaacatttgaaatcaactacaagtacatgggactggtgataaatgatcctaaactatcaagtca

SEQ ID NO: 186 - DNA, 1737 bp, Homo sapiens
tcgagtttttttttttttttttttaaggtaaaaaaaaaatacaccttcagtttcctggtgtgatcctggttaaaatggatgatttttcattgaaagttttgctgattaacaattaaagtgggatgatatgtgggcaaaatcacttatgaaagtagaagcaagaatcagttggtttgctaccacataaagccatgctgtttttggtcaaactgtgtaaactggaaaaattcacatcatttctgagtttaatcactttaggatatattcacattgttttggtgaatttgctgaattgaattgtttttctttctcaaatctgtgatctcttttctttatcctgtttctttgttcctttcgtttgctttcttatttttcttttgttccattcttttcttacttttttcccttttccttttttggggaggctggctagtagtgtgtgagaaaagaatagaagtgaaatttgcataatgaatgtaaaagggaaataaaagtcttttgaaggtagctatactagcacttttgatcatcttcagggcccacaaaaatgttgtcaagattttaaaggtttataattctgcttaagctctagtttggacttaggtatcctaactatgttggaggtatttgcattgtttaaagttaggataaaagcaagttcctcctgtgactgcaacgtcttactgattgggacagttgccaggaggataccaacttgatagcagagggggttttatgcaaacgcactcacctccgccttggggaatgaaagggtcacttctgcatcatcactagctagttttctagtgttagagaggcttacaaatgtttgccattctcataagtgttttgaacttgatctttgtgacttgtgcttttttagcttctctcttgaatcagagtatcattgtcttcctccaaggagttagaatttcccagtttaaaacaaaaagggaaatgtcctaggttttctttgtgcttctcatttttcctttgttgattcaattcctgtgatttttgttctcttccctgaagtgctttacagtgcatggaatctccatcattgttattttaacgatagtaattcacagtcctcagaagcctatttttaaagcagaagcaaaaaagaaaaacaaaataacaaaaacaacccttcctcttttctctcatctcacctctctgtgttgattactaatcatcttagatattattgctagtggatgtatggtagatgggttgaagcttttctgataattattacacaatttaaaacaacatatatatttaaaataaatatatacagtaaatatattgagccatgttaacctgccaatgagatctgtgaaaaaataatggcctcatttttctctttttaatttcttttacccttttgtgaagcagctatacgtggcatacatgtatttaaagaaaaaaaaatagatgtagagtgttttttttacacttttaacttagcatgtggtgttgaagtattactgtagatcaagtttgtcttccgcactaagatgtgaggaaattgtgatttgttctctccaccacaaatgaattacacatttattatcttctatcattttgaaacactgcagtttaccatgggacactgtatatatttcttgccataatggtaaaggactgattgatatatttaagagttaataaatttgtgatttctgctgaaaaaaaaaaaaaaaaaaaaaaaaaaaaaaaaaaaaaaaaaaa

SEQ ID NO: 187 - DNA, 1132 bp, Homo sapiens
  misc_feature (1131): n equals a,t,g, or c
  misc_feature (1132): n equals a,t,g, or c
ggcagagtggacacctgcatcaagaccaagtcgcagctgatgatgccagtttcaaggcccatgggcctgtccccaacccccagcccatcgacccagctagcctggaggagttcaagaggaagatcctggagtcccagaggccccctgcaggcatccctgtagccccatccagtggctgaggaggctccaggcctgaggaccaagggatggcccgactcggcggtttgcggaggatgcagggatatgctcacagcgcccgacacaaccccctcccgccgcccccaaccacccagggccaccatcagacaactccctgcatgcaaacccctagtaccctctcacacccgcacccgcgcctcacgatccctcacccagagcacacggccgcggagatgacgtcacgcaagcaacggcgctgacgtcacatatcaccgtggtgatggcgtcacgtggccatgtagacgtcacgaagagatatagcgatggcgtcgtgcagatgcagcacgtcgcacacagacatggggaacttggcatgacgtcacaccgagatgcagcaacgacgtcacgggccatgtcgacgtcacacatattaatgtcacacagacgcggcgatggcatcacacagacggtgatgatgtcacacacagacacagtgacaacacacaccatgacaacgacacctatagatatggcaccaacatcacatgcacgcatgccctttcacacacactttctacccaattctcacctagtgtcacgttcccccgaccctggcacacgggccaaggtacccacaggatcccatcccctcccgcacagccctgggccccagcacctcccctcctccagcttcctggcctcccagccacttcctcacccccagtgcctggacccggaggtgagaacaggaagccattcacctccgctccttgagcgtgagtgtttccaggaccccctcggggccctgagccgggggtgagggtcacctgttgtcgggaggggagccactccttctcccccaactcccagccctgcctgtggcccgttgaaatgttggtggcacttaataaatattagtaaatccttaaaaaaaaaaaaaaaaaaaaaaaaaaaaaaaaaaaaaaaaaaaann

SEQ ID NO: 188 - DNA, 1267 bp, Homo sapiens
  misc_feature (12): n equals a,t,g, or c
  misc_feature (25): n equals a,t,g, or c
ggggatggatgntctccttcagctnttttggagacactatagaaggtacgcctgcaggtaccggtccggaattcccgggttgatccacgcgtccgcccacgcgtccgcccacgcgtccgctggacggcagctatgcgactcaccgtgctgtgtgctgtgtgcctgctgcctggcagcctggccctgccgctgcctcaggaggcgggaggcatgagtgagctacagtgggaacaggctcaggactatctcaagagattttatctctatgactcagaaacaaaaaatgccaacagtttagaagccaaactcaaggagatgcaaaaattctttggcctacctataactggaatgttaaactcccgcgtcatagaaataatgcagaagcccagatgtggagtgccagatgttgcagaatactcactatttccaaatagcccaaaatggacttccaaagtggtcacctacaggatcgtatcatatactcgagacttaccgcatattacagtggatcgattagtgtcaaaggctttaaacatgtggggcaaagagatccccctgcatttcaggaaagttgtatggggaactgctgacatcatgattggctttgcgcgaggagctcatggggactcctacccatttgatgggccaggaaacacgctggctcatgcctttgcgcctgggacaggtctcggaggagatgctcacttcgatgaggatgaacgctggacggatggtagcagtctagggattaacttcctgtatgctgcaactcatgaacttggccattctttgggtatgggacattcctctgatcctaatgcagtgatgtatccaacctatggaaatggagatccccaaaattttaaactttcccaggatgatattaaaggcattcagaaactatatggaaagagaagtaattcaagaaagaaatagaaacttcaggcagaacatccattcattcattcattggattgtatatcattgttgcacaatcagaattgataagcactgttcctccactccatttagcaattatgtcacccttttttattgcagttggtttttgaatgtctttcactccttttaaggataaactcctttatggtgtgactgtgtcttattcatctatacttgcagtgggtagatgtcaataaatgttacatacacaaataaataaaatgtttattccatggtaaaaaaaaaaaaaaaaaaaaaaaaaaaaaaaaaaaaaaaaaaaaaaaaaaaaaaaaaaaaaaaaaaaata

SEQ ID NO: 189 - DNA, 3787 bp, Homo sapiens
  misc_feature (22): n equals a,t,g, or c
  misc_feature (155): n equals a,t,g, or c
agtccggaattcccgggtttgntgacgcgtccgcagcaaggtgcctcgctgtgtcaacactcagcctggcttccactgcctgccctgcccgccccgatacagagggaaccagcccgtcggggtcggcctggaagcagccaagacggaaaagcaantgtgtgagcccgaaaacccatgcaaggacaagacacacaactgccacaagcacgcggagtgcatctacctgggtcacttcagcgaccccatgtacaagtgcgagtgccagasaggctacgcgggcgacgggctcatctgcggggaggactcggacctggacggctggcccaacctcaatctggtctgcgccaccaacgccacctaccactgcatcaaggataactgcccccatctgccaaattctgggcaggaagactttgacaaggacgggattggcgatgcctgtgatgatgacgatgacaatgacggtgtgaccgatgagaaggacaactgccagctcctcttcaatccccgccaggctgactatgacaaggatgaggttggggaccgctgtgacaactgcccttacgtgcacaaccctgcccagatcgacacagacaacaatggagagggtgacgcctgctccgtggacattgatggggacgatgtcttcaatgaacgagacaattgtccctacgtctacaacactgaccagagggacacggatggtgacggtgtgggggatcactgtgacaactgccccctggtgcacaaccctgaccagaccgacgtggacaatgaccttgttggggaccagtgtgacaacaacgaggacatagatgacgacggccaccagaacaaccaggacaactgcccctacatctccaacgccaaccaggctgaccatgacagagacggccagggcgacgcctgtgaccctgatgatgacaacgatggcgtccccgatgacagggacaactgccggcttgtgttcaacccagaccaggaggacttggacggtgatggacggggtgatatttgtaaagatgattttgacaatgacaacatcccagatattgatgatgtgtgtcctgaaaacaatgccatcagtgagacagacttcaggaacttccagatggtccccttggatcccaaagggaccacccaaattgatcccaactgggtcattcgccatcaaggcaaggagctggttcagacagccaactcggaccccggcatcgctgtaggttttgacgagtttgggtctgtggacttcagtggcacattctacgtaaacactgaccgggacgacgactatgccggcttcgtctttggttaccagtcaagcagccgcttctatgtggtgatgtggaagcaggtgacgcagacctactgggaggaccagcccacgcgggcctatggctactccggcgtgtccctcaaggtggtgaactccaccacggggacgggcgagcacctgaggaacgcgctgtggcacasggggaacacgccggggcaggtgcgaaccttatggcacgaccccaggaacattggctggaaggactacacggcctataggtggcacctgactcacaggcccaagactggctacatcagagtcttagtgcatgaaggaaaacaggtcatggcagactcaggacctatctatgaccaaacctacgctggcgggcggctgggtctatttgtcttctctcaagaaatggtctatttctcagacctcaagtacgaatgcagagatatttaaacaagatttgctgcatttccggcaatgccctgtgcatgccatggtccctagacacctcagttcattgtggtccttgtggcttctctctctagcagcacctcctgtcccttgaccttaactctgatggttcttcacctcctgccagcaaccccaaacccaagtgccttcagaggataaatatcaatggaackcagagatgaacatctaacccactagaggaaaccagtttggtgatatatgagactttatgtggagtgaaaattgggcatgccattacattgctttttcttgtttgtttaaaaagaatgacgtttacatataaaatgtaattacttattgtatttatgtgtatatggagttgaagggaatactgtgcataagccattatgataaattaagcatgaaaaatattgctgaactacttttggtgcttaaagttgtcactattcttgaattagagttgctctacaatgacacacaaatcccrttaaataaattataaacaagggtcaattcaaatttgaagtaatgttttagtaaggagagattagaagacaacaggcatagcaaatgacataagctaccgattaactaatcggaacatgtaaaacagttacaaaaataaacgaactctcctcttgtcctacaatgaaagccctcatgtgcagtagagatgcagtttcatcaaagaacaaacatccttgcaaatgggtgtgacgcggttccagatgtggatttggcaaaacctcatttaagtaaaaggttagcagagcaaagtgcggtgctttagctgctgcttgtgccgctgtggcgtcggggaggctcctgcctgagcttccttccccagctttgctgcctgagaggaaccagagcagacgcacaggccggaaaaggcgcatctaacgcgtatctaggctttggtaactgcggacaagttgcttttacctgatttgatgatacatttcattaaggttccagttataaatattttgttaatatttattaagtgactatagaatgcaactccatttaccagtaacttattttaaatatgcctagtaacacatatgtagtataatttctagaaacaaacatctaataagtatataatcctgtgaaaatatgaggcttgataatattaggttgtcacgatgaagcatgctagaagctgtaacagaatacatagagaataatgaggagtttatgatggaaccttaatatataatgttgccagcgattttagttcaatatttgttactgttatctatctgctgtatatggaattcttttaattcaaacgctgaaaacgaatcagcatttagtcttgccaggcacacccaataatcagtcatgtgtaatatgcacaagtttgtttttgtttttgttttttttgttggttggtttgtttttttgctttaagttgcatgatctttctgcaggaaatagtcactcatcccactccacataaggggtttagtaagagaagtctgtctrtctgatgatggatagggggcaaatctttttcccctttctgttaatagtcatcacatttctatgccaaacaggaacgatccataactttagtcttaatgtacacattgcattttgataaaattaattttgttgtttcctttgaggttgatcgttgtgttgttgttttgctgcactttttacttttttgcgtgtggagctgtattcccgagaccaacgaagcgttgggatacttcattaaatgtagcgactgtcaacagcgtgcaggttttctgtttctgtgttgtggggtcaaccgtacaatggtgtgggagtgacgatgatgtgaatatttagaatgtaccatattttttgtaaattatttatgtttttctaaacaaatttatcgtataggttgatgaaacgtcatgtgttttgccaaagactgtaaatatttatttatgtgttcacatggtcaaaatttcaccactgaaaccctgcacttagctagaacctcatttttaaagattaacaacaggaaataaattgtaaaaaaggttttctataaaaaaaaaa

SEQ ID NO: 190 - DNA, 554 bp, Homo sapiens
  misc_feature (520): n equals a,t,g, or c
  misc_feature (542): n equals a,t,g, or c
ggcagagggacagcaacatttcccacaggacacgartttgtcggcccttgccttggcagagctgaggcattttggagatcaaagatgggtagaaaagatgctgctactataaaacttcctgttgatcagtacagaaaacaaattggtaaacaggattataaaaaaactaaacctattttacgagcaaccaaattaaaagcagaagcaaagaaaacagcaataggcataaaggaagttggccttgtacttgcagctatattggcactactactggctttctatgctttcttttatctcagactcaccacggatgttgaccctgatctggaccaagatgaagattagctaagcaacaatcaatgcatgaaagagaaataactttacgaaagcaccttttgggaccaaaactttcaatactgaaactgtaacatctttaattmtttctgctaatattttcagtttgcagacatatgatttttgatagttgcataggatgtcaggaaaagaaccttacctagcnatgcagtatagtatgtgctacngggatacttgta

SEQ ID NO: 191 - DNA, 874 bp, Homo sapiens
ggcacagacgggatgaggcgctgcagtctctgcgctttcgacgccgcccgggggcccaggcggctgatgcgtgtgggcctcgcgctgatcttggtgggccacgtgaacctgctgctgggggccgtgctgcatggcaccgtcctgcggcacgtggccaatccccgcggcgctgtcacgccggagtacaccgtagccaatgtcatctctgtcggctcggggctgctgagcgtttccgtgggattgtggccctcctggcgtccaggaamcttcttcgccctccactgcactgggtcctgctggcamtagctctggtgaacctgctcttgtccgttgcctgctccctgggcctccttcttgctgtgtcactcactgtggccaacggtggccgccgccttattgctgactgccacccaggactgctggatcctctggtaccactggatgaggggccgggacatactgactgcccctttgaccccacaagaatctatgatacagccttggctctctggatcccttctttgctcatgtctgcaggggaggctgctctatctggttactgctgtgtggctgcactcactctacgtggagttgggccctgcaggaaggacggacttcaggggcagctagaggaaatgacagagcttgaatctcctaaatgtaaaaggcaggaaaatgagcagctactggatcaaaatcaagaaatccgggcatcacagagaagttgggtttaggacagcaggtgctgttccgagactcagtcctaaagggttttttttcccactaagcaaggggccctgacctcgggatgagataacaaattgtaataaagtaacttctcttttcttctaaaaaaaaaaaaaaaaaactcgag

SEQ ID NO: 192 - DNA, 2103 bp, Homo sapiens
  misc_feature (140): n equals a,t,g, or c
tagtagtaaacaggtggggactccattgccagcttggtgccttatctactgggcagtcgagttggtgtcttcatgggcagaaataggttgtaaaggtggccaactctccaggtgagagagagttttgtagcaggactttnggttgtaaatcgactattaccaacctactggtgggtgagagttcaagaaacccatgaaaaaggacatagtggaagatgaagatgatgactttctgaaaggcgaagtgccccagaatgataccgtgattgggatcacaccaagctcctttgacacgcatttccgaagtccttcaagtagtgtgggctccccacccgtgttgtacatgcaacccagtcccctctgacggcagaaatttgtgactgagatgtgacatttgggattccccatcacttgtcatgccctcagcacccagcttgtgccattgggcattgatggcattgaactagagcgagtgcctgcctcggctgtggcacttccaggttcgactgaatcaagcatctgaagactgggtttttttgttgttgttgttccccttacagacaaaatgaagactatcatgtgcaatcttttacagtggggttgatgatacatttggaaggatttgcttgtttaatatgtacattttttgtgttaacagctttttgacacaattactgggtaatttctaatataggcagcagactgttttacgggttgctgttttaacatgggtttttgtcagatccatggtcttaggacttgactgatgagctttcagtgaagaatcctctaagataaaacttctatttaaagactttaactagaaagtgtttattttggctacattgttcaccttctgctgtattggtatttgtctgttgggatttcaagggagtgtagagaagacagaaggaaagctgagagctggcccgacatggtctgggacacagagttggagctggcactgaagatctccagggacttcagagaccaataaaagcccatagggaagagagagaggatatagggaaacagaatcagatgtgtaatatacttggcacagcgaaaaaatggatttaaaagacaaaaatggaggtccaggtagatgtaattcacacagactgaaagtgagttcgggcttgtgtaaaacacatgagattggatttgaccccttggctctcaagtgtccccttagatctagaactgctccttggtggccattagatcgagtcagttttgatctgcatcacttagttattgggaatttctttgttggaaacaggaaaatttttttagattatttggtgtacggttttgctcacaacaataggtggaagttgctagtgcagtcttggtctgatggctgtgtgcatcgcacattcggcttggtgaaatccttctctaaagcctctttttgtatttttataactaaacagaggaagtcttcagaagacctcgctttaaaacaaatttgtgcaaacactgctagagtcattttgaagctcaagcattttcactttgtttcttacatgtgtacttttttgtttacttgtgaaaatggccatctttaagcatatttattttctgccactttatttaaaggcaagcaatattttcttgatcataaatattttgtaatgaaatacttcctcttttccagggctttgtatgcacttgtataattacattgatggcaatgtagagtttgaatttcagtctgtaaatacttttttggaaaatagaaatttttattgctttaaagttttggatatgggtggttttcttttccgggtttggtggaaagtaatttgagaactttaaggttgtctttttaactgctggcaaaatgttgattttttaatattagataaaacgagtaaacgaaattccccagaaattagtagtaagtggggtctttgtgggttgggaagtagttttaatgtagaaagacatttacatataagtctgtttaatttcaaaggagtttgtgaaaaaaaatccatggtgaaaatgaaacaatgacatggttaatctggaacttacgttcttataccaataaaaggtacctcaatamaaaaaaaaaaaaaaaaaccccgggggggg

SEQ ID NO: 193 - DNA, 1317 bp, Homo sapiens
  misc_feature (1314): n equals a,t,g, or c
  misc_feature (1315): n equals a,t,g, or c
  misc_feature (1316): n equals a,t,g, or c
agcatagccttcgtgtgaaggccagtgaacagcagctgagctaattcatgaggtatttgcccttctgaagttggaatctgtaatgatttaaaacatgagactggtccagtgggcttgttgctccagacctcatgccttctgggacccagacatctctgcaatctcgggaactggaatacaccacttcttgtcaaggtactagcaagttgccgtggatacagaaatctctgcaggcaagttgctccagagcatattgcaggacaagcctgtaacgaatagttaaattcacggcatctggattcctaatccttttccgaaatggcaggtgtgagtgcctgtataaaatattctatgtttaccttcaacttcttgttctggctatgtggtatcttgatcctagcattagcaatatgggtacgagtaagcaatgactctcaagcaatttttggttctgaagatgtaggctctagctcctacgttgctgtggacatattgattgctgtaggtgccatcatcatgattctgggcttcctgggatgctgcggtgctataaaagaaagtcgctgcatgcttctgttgtttttcataggcttgcttctgatcctgctcctgcaggtggcgacaggtatcctaggagctgttttcaaatctaagtctgatcgcattgtgaatgaaactctctatgaaaacacaaagcttttgagcgccacaggggaaagtgaaaaacaattccaggaagccataattgtgtttcaagaagagtttaaatgctgcggtttggtcaatggagctgctgattggggaaataattttcaacactatcctgaattatgtgcctgtctagataagcagagaccatgccaaagctataatggaaaacaagtttacaaagagacctgtatttctttcataaaagacttcttggcaaaaaatttgattatagttattggaatatcatttggactggcagttattgagatactgggtttggtgttttctatggtcctgtattgccagatcgggaacaaatgaatctgtggatgcatcaacctatcgtcagtcaaacccctttaaaatgttgctttggctttgtaaatttaaatatgtaagtgctatataagtcaggagcagctgtctttttaaaatgtctcggctagctagaccacagatatcttctagacatattgaacacatttaagatttgagggatataagggaaaatgatatgaatgtgtatttttactcaaaataaaagtaactgtttacgttgaaaaaaaaaaaaaargkcggccgytytaragayccarcttactnnnc

SEQ ID NO: 194 - DNA, 1252 bp, Homo sapiens
  misc_feature (1231): n equals a,t,g, or c
  misc_feature (1240): n equals a,t,g, or c
gcccacgmgcggccgcgcggaggaggccaagatggcggcagctgcggcttcgcttcgcggggtagtgttgggcccgcggggcgcggggctcccgggcgcgcgtgcccggggtctgctgtgcagcgcgcggcccgggcagctcccgctacggacacctcaggcagtggccttgtcgtcgaagtctggcctttcccgaggccggaaagtgatgctgtcagcgctgggcatgctggcggcagggggtgcggggctggccgtggctctgcattcggctgtgagtgccagtgacctggagctgcacccccccagctatccgtggtctcaccgtggcctcctctcttccttggaccacaccagcatccggaggggtttccaggtatataagcaggtgtgcgcctcctgccacagcatggacttcgtggcctaccgccacctggtgggcgtgtgctacacggaggatgaagctaaggagctggctgcggaggtggaggttcaagacggccccaatgaagatggggagatgttcatgcggccagggaagctgttcgactatttcccaaaaccataccccaacagtgaggctgctcgagctgccaacaacggagcattgccccctgacctcagctacatcgtgcgagctaggcatggtggtgaggactacgtcttctccctgctcacgggctactgcgagccacccaccggggtgtcactgcgggaaggtctctacttcaacccctactttcctggccaggccattgccatggcccctcccatctacacagatgtcttagagtttgacgatggcaccccagctaccatgtcccagatagccaaggatgtgtgcaccttcctgcgctgggcatctgagccagagcacgaccatcgaaaacgcatggggctcaagatgttgatgatgatggctctgctggtgcccctggtctacaccataaagcggcacaagtggtcagtcctgaagagtcggaagctggcatatcggccgcccaagtgaccctgtccagtgtctgcttgccatcctgccagaacaggccctcaagcccaagagccatcccagcctgttcaggcctcagctaagcctctcttcatctggaagaagaggcaagggggcaggagaccaggctctagctctgggccctccttcagcccccatcatgggaataaattaattttctcaatgtaaaaaaaaaaaaaaaaaactcggggggggcccggncccaatttncccttttggggg

SEQ ID NO: 195 - DNA, 1688 bp, Homo sapiens
ggcacgagcggaactgctccggagggcacgggctccgtagcaccaactgcaaggacccctccccctgcgggcgctcccatggcacagttcgcgttcgagagtgacctgcactcgctgcttcagctggatgcacccatccccaatgcaccccctgcgcgctggcagcaaaagccaaggaagccgcagcccggccccctcacccatgcgggccgccaaccgatcccacagcgccggcaggactccgggccgaactcctggcaaatccagttccaaggttcagaccactcctagcaaacctggcggtgaccgctatatcccccatcgcagtgctgcccagatggaggtggccagcttcctcctgagcaaggagaaccagcctgaaaacagccagacgcccaccaagaaggaacatcagaaagcctgggctttgaacctgaacggttttgatgtagaggaagccaagatccttcggctcagtggaaaaccacaaaatgcgccagagggttaycagaacagactgaaagtactctacagccaaaaggccactcctggctccagccggaagacctgccgttacattccttccctgccagaccgtatcctggatgcgcctgaaatccgaaatgactattacctgaaccttgtggattggagttctgggaatgtactggccgtggcactggacaacagtgtgtacctgtggagtgcaagctctggtgacatcctgcagcttttgcaaatggagcagcctggggaatatatatcctctgtggcctggatcaaagagggcaactacttggctgtgggcaccagcagtgctgaggtgcagctatgggatgtgcagcagcagaaacggcttcgaaatatgaccagtcactctgcccgagtgggctccctaagctggaacagctatatcctgtccagtggttcacgttctggccacatccaccaccatgatgttcgggtagcagaacaccatgtggccacactgagtggccacagccaggaagtgtgtgggctgcgctgggccccagatggacgacatttggccagtggtggtaatgataacttggtcaatgtgtggcctagtgctcctggagagggtggctgggttcctctgcagacattcacccagcatcaaggggctgtcaaggccgtagcatggtgtccctggcagtccaatgtcctggcaacaggagggggcaccagtgatcgacacattcgcatctggaatgtgtgctctggggcctgtctgagtgccgtggatgcccattcccaggtgtgctccatcctctggtctccccattacaaggagctcatctcaggccatggctttgcacagaaccagctagttatttggaagtacccaaccatggccaaggtggctgaactcaaaggtcacacatcccgggtcctgagtctgaccatgagcccagatggggccacagtggcatccgcagcagcagatgagaccctgaggctatggcgctgttttgagttggaccctgcgcggcggcgggagcgggagaaggccagtgcagccaaaagcagcctcatccaccaaggcatccgctgaagaccaacccatcacctcagttgttttttatttttctaataaagtcatgtctcccttcatgttttttttttaaaaaaaaaaaaaaaaaaaaaaaaaaaaaaaaaaaaaaaaa

SEQ ID NO: 196 - DNA, 756 bp, Homo sapiens
  misc_feature (756): n equals a,t,g, or c
ggcacgagccgccctcggcgtcctctgtagcgggcgacctaggccgcgggacccggacggaggtagaggccagggcagcgcgtccgggagcggagtccgcgcccgccgccgccatgccggacagctgggacaaggatgtgtaccctgagcccccgcgccgcacgccggtgcagcccaatcccatcgtctacatgatgaaagcgttcgacctcatcgtggaccgacccgtgaccctcgtgagagaatttatagagcggcagcacgcaaagaacaggtattactactaccaccggcagtaccgccgcgtgccagacatcactgagtgcaaggaggaggacatcatgtgcatgtatgaagccgaaatgcagtggaagagggactacaaagtcgaccaagaaattatcaacattatgcaggatcggctcaaagcctgtcagcagagggaaggacagaactaccagcagaactgtatcaaggaagtggagcagttcacccaggtggccaaggcctaccaggaccgctatcaggacctgggggcctacagttctgccaggaagtgcctggccaaacagaggcagaggatgctgcaagagagaaaagctgcaaaagaggccgccgctgccacctcctgaggcagctgtgggtgcccctgctgtgtggctctgtatgactgttgctgaaatataaagccctgcaacctgaaaaaaaaaaaaaaaaaaaaaaaaaaaaaaaaaaaaaaaaaaaaaaaaaaaattn

SEQ ID NO: 197 - DNA, 1471 bp, Homo sapiens
  misc_feature (458): n equals a,t,g, or c
ttggctgctcctgacctcagcaaaccaagagggtatcactgggatacatcagattggatgccaagcgttcctctgccggacatacaagagttccccaactatgaggtgattgatgagcagacacccctgtactcagcagatccaaacgccatcgatacggactattaccctggaggctacgacatcgaaagtgattttcctccacccccagaagacttccccgcagctgatgagctaccaccgttaccgcccgaattcagcaatcagtttgaatccatccaccctcctagagacatgcctgccgcgggtagcttgggttcttcatcaagaaaccggcagaggttcaacttgaatcagtatttgcccaatttttatcccctcgatatgtctgaacctcaaacaaaaggcactggtgagaatagtacttgtagagaaccccatgccccttacccgccagngtatcaaagacacttcgaggcgcccgctgtcgagagcatgcccatgtctgtgtacgcctccaccgcctcctgctctgacgtgtcagcctgctgcgaagtggagtccgaggtcatgatgagtgactatgagagcggggacgacggccacttcgaagaggtgacgatcccgcccctggattcccagcagcacacggaagtctgactctcaactccccccaaagtgcctgactttagtgaacctagaggtgatgtgagtaatccgcgctgttctttgcagcagtgcttccaagctttttttggtgagccgaatgggcatggctgcgctggatcctgcgcctctggacgtgctagccatttccagtgtcccaactactgtcatcgtgaggttttcatcggctgtgccatttcccaacgtcttttgggatttacatctgtctgtgttaaaataatcaaacgaaaaatcagtcctgtgttgtcagcatgattcatgtatttatatagatttgattattttaattttcctgtctcttttttttgtaaattttatgtacagatttgatttttcatagttttaactagatttccaagatattttgtgcatttgtttcaactgaattttggtggtggtagtgccattatctagcaccctgattttttttttttactataaccagggtttcattctgtctttttccactgaagtgtgacattttgttagtacatttcagtgtagtcattcatttctagctgtacataggatgaaggagagatcagatacatgaacatgtcttacatgggttgctgtatttagaattataaacatttttcattattggaaagtgtaacggggaccttctgcatacctgtttagaaccaaaaccaccatgacacagtttttatagtgtctgtatatttgtgatgcaatggtcttgtaaaggtttttaatgaaaactaccattagccagtctttcttactgacaataaattattaataaaataaaaaaaaaaaaaaa

SEQ ID NO: 198 - DNA, 692 bp, Homo sapiens
  misc_feature (43): n equals a,t,g, or c
gtgaattggtaattcgacctcccctatagggccgaatttgggntaccgggccccccccttagtgcggcttgctcttggaagttcaggctcggttgtcttttgggagccatggagagtgacttttatctgcgttactacgtggggcacaagggcaagttcggccacgagttcctggagtttgagtttcgaccggacgggaagttaagatatgccaacaacagcaattacaagaatgatgtcatgatcagaaaagaggcttatgtacataaaagcgtgatggaggaactgaagagaataattgacgacagtgaaattaccaaagaggatgatgcattgtggcctcctcctgaccgagtgggccggcaggagcttgaaatcgtcattggagatgaacacatttcttttacaacatcaaaaattggttcccttattgatgtcaatcaatccaaggatccagaaggcttacgagtattttattatcttgtccaggacctgaagtgtttggtcttcagtcttattggattacacttcaagattaaaccaatctagactgaatattggtgtggacatggggggtgggtgggagtagaaaattttgtgtatatcagggcagtatttttttatgaactataaatgattgtctttaataaatatgtgataaaatccaatttttattattttataaagacctg

SEQ ID NO: 199 - DNA, 1573 bp, Homo sapiens
ctcgtgccgaattcggcacgagccggcgccagctacgccgctgccgctgtcactatggcccattacaaagccgccgactcgaagcgtgagcagttccggaggtacttggagaagtcgggggtgctggacacgctgaccaaggtgttggtagccttatatgaagaaccagagaaacctaacagtgctttggattttttaaagcatcacttaggagctgctactccagaaaatccagaaatagagctgcttcgcctagaactggccgaaatgaaagagaagtatgaagctattgtagaagaaaataaaaaactgaaagcaaagcttgctcagtatgaaccacctcaggaggagaagcgtgctgaataggattcttctcagtttgaaagacaatgaaaaatggttttgtatgacttgaatagtttgtatagtatataatcttttctgaacagatgctatagaactcttttaatatgtttaattcacctatcacactctgttaaaaacacatagaatcatcaataaaaactcaatataactttctttgggtcttaaagcaggagaatccaaagtaaatcctgaacaaaacctaaacacagccatctaactcattaccttaaaagacattctgkttattagtctgattaggaatgatggcactggttgtattttagccaagacagtttagcatggagctattccttggtgcagttcaggatatgaacacaggtacagtcattctttgaaggtgacactgttctgtatattccctataggcagctggagagatctgtgtgacacaagatgcttttgtacgggttcccatgaatcttctgctcttgtttgtgtgacatggaacaaataacttctttgccaccactttgccttagataactgtgtgtgtgtgtgccagtttgaactctgacaccacattttccttctatgcaatcatgcctgtctgataatcttgcattgctttcctctgagctttagtgggtcctagttgcacactggcctttctgtgctgtttttcaatttgcctaataatagcagttaccctgattgtaatttatgtaactttaaacaggatcacactgtaccccctgcctgccttatttgcttactgagcacaggacagaggcaatatacaactctgggttcacacacaagctgagatgagaagaggaatgagccatatattggggaaaatcatagtttgtaggtataattatatagtgcttttctccctcaaagtatttttctagccttgaattcattttatcttcattatccctgtgaagtaggtgggacaagtataaggggaagaggggtgctgaatttttaggccaaagactgatattaatacaaatcactcactaactgtagagccttgggcattatcagtgaactactctgagatttactgtcttcatctgtttaatgagtagaatgtccgtgatgcctacctcacagggttgttgtgagggtcaaatgagaatgtatgtgaaagatttgtaaatggtaaagcactatattcttgttaaaaaaaaaaaaaaaaaaaaaaaaaaaaaaaaaa

SEQ ID NO: 200 - DNA, 2742 bp, Homo sapiens
  misc_feature (26): n equals a,t,g, or c
gggtcgacccacgcgtccgcccacgntccgtgaatggtgaactccagaaagccattgacttattcacagatgccatcaagctgaatcctcgcttggccattttgtatgccaagagggccagtgtcttcgtcaaattacagaagccaaatgctgccatccgagactgtgacagagccattgaaataaatcctgattcagctcagccttacaagtggcgggggaaagcacacagacttctaggccactgggaagaagcagcccatgatcttgcccttgcctgtaaattggattatgatgaagatgctagtgcaatgctgaaagaagttcaacctagggcacagaaaattgcagaacatcggagaaagtatgagcgaaaacgtgaagagcgagagatcaaagaaagaatagaacgagttaagaaggctcgagaagagcatgagagagcccagagggaggaagaagccagacgacagtcaggagctcagtatggctcttttccaggtggctttcctgggggaatgcctggtaattttcccggaggaatgcctggaatgggagggggcatgcctggaatggctggaatgcctggactcaatgaaattcttagtgatccagaggttcttgcagccatgcaggatccagaagttatggtggctttccaggatgtggctcagaacccagcaaatatgtcaaaataccagagcaacccaaaggttatgaatctcatcagtaaattgtcagccaaatttggaggtcaagcgtaatgtccttctgataaataaagcccttgctgaaggaaaagcaacctagatcaccttatggatgtcgcaataatacaaaccagtgtacctctgaccttctcatcaagagagctggggtgctttgaagataatccctacccctctcccccaaatgcagctgaagcattttacagtggtttgccattagggtattcattcagataatgttttcctactaggaattacaaactttaaacactttttaaatcttcaaaatatttaaaacaaatttaaagggcctgttaattcttatatttttctttactaatcattttggatttttttctttgaattattggcagggaatatacttatgtatggaagattactgctctgagtgaaataaaagttattagtgcgaggcaaacataactcatttgaggataaagtttgtgttggatatgtggttcctgatgcattttgacttgtctttttaaatgctttatctttttctttaaagatttatttcaataaaactaattgggaccacccgtatttcagtaggacctgggtagggattggaagtacttggcagggcagcagcaatcttgctgtgtttgatataacatgcatccttgggcaggttgcccttaaatcttacactgtggtgaagggatgttttttttgtaatgctgcagtagagttggagtacttagttctcttgttgtccagtatatctaataagtgtttttcatattatttccacgtaagggaaataaggtagtacttttctttttatatttctatgcttaaaattctctttcctagtcaaaaattgcccaaatctgtgtttgctttctgcttgctacatttgtctcccttacttttcttgagctaaagacaggctttttccaccggcatcatcactgctatcatcattaacagcgtaattatacaagcatatttaatgctgagtttaatttaatatgtaatacatatggtaattgtagggtaatacccacaacaactgtagtttcttacttggccaagagaatgcttatttaagtgttagacttccattctggcaaaatcttgccttatcagaagacattggaaagagggattccctttggtgtttggtcttctacttagaaaaacctattgcagttagtttatcttgtagtattcatctttgtattctgaagataaggtttgaattaaattgatacacacagaggggaaccgattttttttatccaatgtgaattataaatgagataatccacagttattcattgtggagttgttgagactatgaaagactcattgtctttgtattcagctcttaaatagtgtaactatatccccacctctgcttgctttctttccctcccctccaatgataaagaaaatgataaattttctgttgtgcattcaattcttattttaaataagactaagtataggcattgtacctgacattgctacgtttctaccagtgtttcaatttaaagtgctagtgtttaaaaacattttcaagggataaggccttctgtactttgcttatttgaagaatcagtggtaggagcagtgaagtaaattctatggagtacatttctaaaataccacatttctgaaatcataaataagtttattcaggttctaaccctttgctgtacacaagcagacagaaatgcatctgttacataaatgagaaaaagctattatgctgatggagcatgctttttaaatcctttaaaaacactcaccatataaacttgcatttgagcttgtgtgttcttttgttaatgtgtagagttctcctttctcgaaattgccagtgtgtacttggcttaactcaagaacagtttcttctggattccttatttgatttatttaacctaattatattctaatattgcaaatattaccataagtgggtaaaagtaaaattcctcttctgaaaaaaaaaaaaaaaaaaaaaaaaaaaaaaggggggggg

SEQ ID NO: 201 - DNA, 1417 bp, Homo sapiens
atgaagacttgtcaagaggaaaaattgatgggacacttgggtgttgtattgtatgagtatttgggtgaagagtaccctgaagtattgggcagcattcttggagcactgaaggccattgtaaatgtcataggtatgcataagatgactccaccaattaaagatctgctgcctagactcacccccatcttaaagaacagacatgaaaaagtacaagagaattgtattgatcttgttggtcgtattgctgacaggggagctgaatatgtatctgcaagagagtggatgaggatttgctttgagcttttagagctcttaaaagcccacaaaaaggctattcgtagagccacagtcaacacatttggttatattgcaaaggccattggccctcatgatgtattggctacacttctgaacaacctcaaagttcaagaaaggcagaacagagtttgtaccactgtagcaatagctattgttgcagaaacatgttcaccctttacagtactccctgccttaatgaatgaatacagagttcctgaactgaatgttcaaaatggagtgttaaaatcgctttccttcttgtttgaatatattggtgaaatgggaaaagactacatttatgccgtaacaccgttacttgaagatgctttaatggatagagaccttgtacacagacagacggctagtgcagtggtacagcacatgtcacttggggtttatggatttggttgtgaagattcgctgaatcacttgttgaactatgtatggcccaatgtrtttgagacatctcctcatgtaattcaggcagttatgggagccctagagggcctgagagttgctattggaccatgtagaatgttgcaatattgtttacagggtctgtttcacccagcccggaaagtcagagatgtatattggaaaatttacaactccatctacattggttcccaggacgctctcatagcacattacccaagaatctacaacgatgataagaacacctatattcgttatgaacttgactatatcttataattttattgtttattttgtgtttaatgcacagctacttcacaccttaaacttgctttgatttggtgatgtaaacttttaaacattgcagatcagtgtagaactggtcatagaggaagagctagaaatccagtagcatgatttttaaataacctgtctttgtttttgatgttaaacagtaaatgccagtagtgaccaagaacacagtgattatatacactatactggagggatttcatttttaattcatctttatgaagatttagaactcattccttgtgtttaaagggaatgtttaattgagaaataaacatttgtgtacaaaatgctaaaaaaaaaaaaaaaaaaaaactcgaggggggcccgtacccaattcgccgtatagtga

SEQ ID NO: 202 - DNA, 1512 bp, Homo sapiens
  misc_feature (855): n equals a,t,g, or c
  misc_feature (1512): n equals a,t,g, or c
cttagaagaccctatgcaaggtacaacggcttgtaccggtccggaattcgcgggcgcgkcaacttggagagtactcgggttcgtgaacttcccggaggcgcaatgagctgcattaacctgcccactgtgctgccyggctcccccagcaagacccgggggcagatccaggtgattctcgggccgatgttctcaggaaaaagcacagagttgatgagacgcgtccgtcgcttccagattgctcagtacaagtgcctggtgatcaagtatgccaaagacactcgctacagcagcagcttctgcacacatgaccggaacaccatggaggcrctgcccgcctgcctgctccgagacgtggcccaggaggccctgggcgtggctgtcataggcatcgacgaggggcagtttttccctgacatcgtggagttctgcgaggccatggccaacgccgggaagaccgtaattgtggctgcactggatgggaccttycagaggaagccatttggggccatcctgaacctggtgccgctggccgagagcgtggtgaagctgacggcggtgtgcatggagtgcttccgggaagccgcctataccaagaggctcggcacagagaaggaggtcgaggtgattgggggagcagacaagtaccactccgtgtgtcggctctgctacttcaagaaggcctcaggccagcctgccgggccggacaacaaagagaactgcccagtgccaggaaagccaggggaagccgtggctgccaggaagctctttgccccacagcagattctgcaatgcagccctgccaactgagggacctgcgagggccgcccgctcccttcctgccactgccgcctactnggacgctgccctgcatgctgcccagccactccaggaggaagtcgggaggcgtggagggtgaccacaccttggccttctgggaactctcctttgtgtggctgccccacctgccgcatgctccctcctctcctacccactggtctgcttaaagcttccctctcagctgctgggacgatcgcccaggctggagctggccccgcttggtggcctgggatctggcacactccctctccttggggtgagggacagagccccacgctgttgacatcagcctgcttcttcccctctgcggctttcactgctgagtttctgttctccctgggaagcctgtgccagcacctttgagccttggcccacactgaggcttaggcctctctgcctgggatgggctcccaccctcccctgaggatggcctggattcacgccctcttgtttccttttkggctcaaagcccttcctacctctggtgatggtttccacaggaacaacagcatctttcaccaagatgggtggcaccaaccttgctgggacttggatcccaggggcttatctcttcaagtgtggagagggcagggtccacgcctctgctgtagcttatgaaattaactaattgaaaattcaaaaaaaaaaaaaaaaaaaaaaaaaaaaaaaaaaaan

SEQ ID NO: 203 - DNA, 419 bp, Homo sapiens
  misc_feature (384): n equals a,t,g, or c
cctgggcagagccggtggcaagggcctcccctgccgctgtgccaggcaggcagtgccaaatccggggagcctggagctggggggaaggccggggacagcccggccctgccccctcccccgctgggagcccagcaacttctgaggaaagtttggcacccatggcgtggcggtgccccaggatgggcagggtcccgctggcctggtgcttggcgctgtgcggctggggcgtgcatggcccccaggggcacgcargctgaagaaagtcccttcgtgggcaacccagggaatatcacaggtgcccggggactcacgggcacccttcggtgtcagctccaggttcagggagagccccccgaggtacattggcttcgggatggacagatnctggagctcgcggacagcacccagacccaggtgtt

SEQ ID NO: 204 - DNA, 2833 bp, Homo sapiens
  misc_feature (2802): n equals a,t,g, or c
  misc_feature (2822): n equals a,t,g, or c
  misc_feature (2831): n equals a,t,g, or c
  misc_feature (2832): n equals a,t,g, or c
gctcgtgccgaattcggcacgagggaagtgaagccccagcgagcggctgcagcggggccgtgaggagcagccagcgggaggcggcggcgagtcggtgagcagctgggaagagcagaaccggggcggagcacctgcaggcgcgggcggcggccccaccatggcgattcgcaagaaaagcaccaagagccccccagtgctgagccacgaattcgtcctgcagaatcacgcggacatcgtctcctgtgtggcgatggtcttcctgctggggctcatgtttgagataacggcaaaagcttctatcatttttgttactcttcagtacaatgtcaccctcccagcaacagaagaacaagctactgaatcagtgtccctttattactatggcatcaaagatttggctactgttttcttctacatgctagtggcgataattattcatgccgtaattcaagagtatatgttggataaaattaacaggcgaatgcacttctccaaaacaaaacacagcaagtttaatgaatctggtcagcttagtgcgttctacctttttgcctgtgtttggggcacattcattctcatctctgaaaactacatctcagacccaactatcttatggagggcttatccccataacctgatgacatttcaaatgaagtttttctacatatcacagctggcttactggcttcatgcttttcctgaactctacttccagaaaaccaaaaaagaagatattcctcgtcagcttgtctacattggtctttacctcttccacattgctggagcttaccttttgaacttgaatcatctaggacttgttcttctggtgctacattattttgttgaatttcttttccacatttcccgcctgttttattttagcaatgaaaagtatcagaaaggattttctctgtgggcagttctttttgttttgggaagacttctgactttaattctttcagtactgactgttggttttggccttgcaagagcagaaaatcagaagctggatttcagtactggaaacttcaatgtgttagctgttagaatcgctgttctggcatccatttgcgttactcaggcatttatgatgtggaagttcattaattttcagcttcgaaggtggagggaacattctgcttttcaggcaccagctgtgaagaagaaaccaacagtaactaaaggcagatcttctaaaaaaggaacagaaaatggtgtgaatggaacattaacttcaaatgtagcagactctccccggaataaaaaagagaaatcttcataatgaattataaactaattgattaatgtccccaaagaaatctgctttctactatatctttcagcattagagatttttctgttcttgaaaatacagtctgtgctctttgatttttgctattgtacggtttcatgcatttttttaaagggcatttgaggggaggattattgctatgaatgaaaaaaatattttagcttagactaagctacctgccttcaaaatagtttagggaccaccaccatattttattttgtttttatttttgaacatttttctaatgatttggagagaaaactatttacaaaaattccacatatcagtgatacaatttcttgctgtcaccaattttttataatagcagagtggcctgttctaagaaggccatattttttaagttatctttcagggtaacatggaaatactataaagttggatgtcaaactttaatatgttttcagtgttctctaattttttggaatttttgtagactttacacctggaaaaaaagatttgtaaaatcaccggaacaattgtgtgctttattttataggtagtggttattagtattacatccccattttaaaaacaaaaacataataatggttacaacacgtggagttttactaacatacatattaaatcaaagtatattcttaaaagtacttgtgaagtaaaatctttcttgtgcattttcaatacttgtaaactggaaatcagaaaatatttactatgaacaggaaaatctgacatatagccctttttgatatgtttattaataatgattcttaatggggctcataataagtttaatatgcacagcatcttagaaaagtttaacctgcaaacacttttaaaacataatgcctacttgatttatatctataaaaagactgacaggtaattatatttggaaaacatttaatgcactaactttaaagaaattgaaaattcaggtggataaatagtcttacaaaagacaatgtgctttatgttatacctatagctttggtcccatctttaattgagaaacatttatctgtataaaacatatttttggataaatatatatatatatatttgtatcgctacagaaaggctctaaaaagcatttgaggaaaatatttggttcccttttctataatcatcctttaagattcttatagctacatttggtttattcatcatatttacagtatatatattgttcttttcagtgttcacatcttgttccccatttctcacttgtgtcaccagctgtttgtgccatttttagtgtaaaagttgcagacctattagatctgcagtttaagttgccatgctgctaggaaattgtcctttttctttctagctgttaacctacttcctggaaaaagtagtagctctctgtagcattatggagtttcagtggaaccaaatttttgccattaaaaactggcattatactgaactatacattgagaaatcaatcaaaataaaaatttttactttcacaaaaaaaaaaaaaaaaaaaaaaaaaaaaaaanaaaaaaaaaaaaaaaaaaanaaaaaaaanna

SEQ ID NO: 205 - DNA, 5830 bp, Homo sapiens
  misc_feature (5584): n equals a,t,g, or c
  misc_feature (5585): n equals a,t,g, or c
  misc_feature (5821): n equals a,t,g, or c
cctgcgagttcagggctcctgccgctctccaggagcaacctctactccggacgcacaggcattccccgcgcccctccagccctcgccgccctcgccaccgctcccggccgccgcgctccggtacacacaggatccctgctgggcaccaacagctccaccatggggctggcctggggactaggcgtcctgttcctgatgcatgtgtgtggcaccaaccgcattccagagtctggcggagacaacagcgtgtttgacatctttgaactcaccggggccgcccgcaaggggtctgggcgccgactggtgaagggccccgacccttccagcccagctttccgcatcgaggatgccaacctgatcccccctgtgcctgatgacaagttccaagacctggtggatgctgtgcgggcagaaaagggtttcctccttctggcatccctgaggcagatgaagaagacccggggcacgctgctggccctggagcggaaagaccactctggccaggtcttcagcgtggtgtccaatggcaaggcgggcaccctggacctcagcctgaccgtccaaggaaagcagcacgtggtgtctgtggaagaagctctcctggcaaccggccagtggaagagcatcaccctgtttgtgcaggaagacagggcccagctgtacatcgactgtgaaaagatggagaatgctgagttggacgtccccatccaaagcgtcttcaccagagacctggccagcatcgccagactccgcatcgcaaaggggggcgtcaatgacaatttccagggggtgctgcagaatgtgaggtttgtctttggaaccacaccagaagacatcctcaggaacaaaggctgctccagctctaccagtgtcctcctcacccttgacaacaacgtggtgaatggttccagccctgccatccgcactaactacattggccacaagacaaaggacttgcaagccatctgcggcatctcctgtgatgagctgtccagcatggtcctggaactcaggggcctgcgcaccattgtgaccacgctgcaggacagcatccgcaaagtgactgaagagaacaaagagttggccaatgagctgaggcggcctcccctatgctatcacaacggagttcagtacagaaataacgaggaatggactgttgatagctgcactgagtgtcactgtcagaactcagttaccatctgcaaaaaggtgtcctgccccatcatgccctgctccaatgccacagttcctgatggagaatgctgtcctcgctgttggcccagcgactctgcggacgatggctggtctccatggtccgagtggacctcctgttctacgagctgtggcaatggaattcagcagcgcggccgctcctgcgatagcgctcaacaaccgatgtgagggctcctcggtccagacacggacctgccacattcaggagtgtgacaagagatttaaacaggatggtggctggagccactggtccccgtggtcatcttgttctgtgacatgtggtgatggtgtgatcacaaggatccggctctgcaactctcccagcccccagatgaacgggaaaccctgtgaaggcgaacgcgggagaccaaagcctgcaagaaagacgcctgccccatcaatggaggctggggtccttggtcaccatgggacatctgttctgtcacctgtggaggaggggtacagaaacgtagtcgtctctgcaacaaccccrcaccccagtttggaggcaaggactgcgttggtgatgtaacagaaaaccagatctgcaacaagcaggactgtccaattgatggatgcctgtccaatccctgctttgccggcgtgaagtgtactagctaccctgatggcagctggaaatgtggtgcttgtccccctggttacagtggaaatggcatccagtgcacagatgttgatgagtgcaaagaagtgcctgatgcctgcttcaaccacaatggagagcaccggtgtgagaacacggaccccggctacaactgcctgccctgccccccacgcttcaccggctcacagcccttcggccagggtgtcgaacatgccacggccaacaaacaggtgtgcaagccccgtaacccctgcacggatgggacccacgactgcaacaagaacgccaagtgcaactacctgggccactatagcgaccccatgtaccgctgcgagtgcaagcctggctacgctggcaatggcatcatctgcggggaggacacagacctggatggctggcccaatgagaacctggtgtgcgtggccaatgcgacttaccactgcaaaaaggataattgccccaaccttcccaactcagggcaggaagactatgacaaggatggaattggtgatgcctgtgatgatgacgatgacaatgataaaattccagatgacagggacaactgtccattccattacaacccagctcagtatgactatgacagagatgatgtgggagaccgctgtgacaactgtccctacaaccacaacccagatcaggcagacacagacaacaatggggaaggagacgcctgtgctgcagacattgatggagacggtatcctcaatgaacgggacaactgccagtacgtctacaatgtggaccagagagacactgatatggatggggttggagatcagtgtgacaattgccccttggaacacaatccggatcagctggactctgactcagaccgcattggagatacctgtgacaacaatcaggatattgatgaagatggccaccagaacaatctggacaactgtccctatgtgcccaatgccaaccaggctgaccatgacaaagatggcaagggagatgcctgtgaccacgatgatgacaacgatggcattcctgatgacaaggacaactgcagactcgtgcccaatcccgaccagaaggactctgacggcgatggtcgaggtgatgcctgcaaagatgattttgaccatgacagtgtgccagacatcgatgacatctgtcctgagaatgttgacatcagtgagaccgatttccgccgattccagatgattcctctggaccccaaagggacatcccaaaatgaccctaactgggttgtacgccatcagggtaaagaactcgtccagactgtcaactgtgatcctggactcgctgtaggttatgatgagtttaatgctgtggacttcagtggcaccttcttcatcaacaccgaaagggacgatgactatgctggatttgtctttggctaccagtccagcagccgcttttatgttgtgatgtggaagcaagtcacccagtcctactgggacaccaaccccacgagggctcagggatactcgggcctttctgtgaaagttgtaaactccaccacagggcctggcgagcacctgcggaacgccctgtggcacacaggaracacccctggccaggtgcgcaccctgtggcatgaccctcgtcacataggctggaaagatttcaccgcctacagatggcgtctcagccacaggccaaagacgggtttcattagagtggtgatgtatgaagggaagaaaatcatggctgactcaggacccatctatgataaaacctatgctggtggtagactagggttgtttgtcttctctcaagaaatggtgttcttctctgacctgaaatacgaatgtagagatccctaatcatcaaattgttgattgaaagactgatcataaaccaatgctggtattgcaccttctggaactatgggcttgagaaaacccccaggatcacttctccttggcttccttcttttctgtgcttgcatcagtgtggactcctagaacgtgcgacctgcctcaagaaaatgcagttttcaaaaacagactcagcattcagcctccaatgaataagacatcttccaagcatataaacaattgctttggtttccttttgaaaaagcatctacttgcttcagttgggaaggtgcccattccactctgcctttgtcacagagcagggtgctattgtgaggccatctctgagcagtggactcaaaagcattttcaggcatgtcagagaagggaggactcactagaattagcaaacaaaaccaccctgacatcctccttcaggaacacggggagcagaggccaaagcactaaggggagggcgcatacccgagacgattgtatgaagaaaatatggaggaactgttacatgttcggtactaagtcattttcaggggattgaaagactattgctggatttcatgatgctgactggcgttasctgattaacccatgtaaataggcacttaaatagaagcaggaaagggagacaaagactggcttctggacttcctccctgatccccacccttactcatcacctgcagtggccagaattagggaatcagaatcaaaccagtgtaaggcagtgctggctgccattgcctggtcacattgaaattggtggcttcattctagatgtagcttgtgcagatgtagcaggaaaataggaaaacctaccatctcagtgagcaccagctgcctcccaaaggaggggcagccgtgcttatatttttatggttacaatggcacaaaattattatcaacctaactaaaacattccttttctcttttttcctgaattatcatggagttttctaattctctcttttggaatgtagattttttttaaatgctttacgatgtaaaatatttattttttacttattctggaagatctggctgaaggattattcatggaacaggaagaagcgtaaagactatccatgtcatctttgttgagagtcttcgtgactgtaagattgtaaatacagattatttattaactctgttctgcctggaaatttaggcttcatacggaaagtgtttgagagcaagtagttgacatttatcagcaaatctcttgcaagaacagcacaaggaaaatcagtctaataagctgctctgccccttgtgctcagagtggatgttatgggattctttttttctctgttttatcttttcaagtggaattagttggttatccatttgcaaatgttttaaattgcaaagaaagccatgaggtcttcaatactgttttaccccatcccttgtgcatatttccagggagaaggaaagcatatacacttttttctttcatttttccaaaagagaaaaaaatgacaaaaggtgaaacttacatacaaatattacctcatttgttgtgtgactgagtaaagaatttttggatcaagcggaaagagtttaagtgtctaacaaacttaaagctactgtagtacctaaaaagtcagtgttgtacatagcataaaaactctgcagagaagtattcccaataaggaaatagcattgaaatgttaaatacaatttctgaaagttatgttttttttctatcatctggtataccattgctttatttttataaattattttctcattgccattggaatagatatctcagattgtgtagatatgctatttaaataatttatcaggaaatactgcctgtagagttagtatttctatttttatataatgtttgcacactgaattgaagaattgttggttttttcttttttttgttttgnntttttttttttttttttttgcttttgacctcccatttttactatttgccaatacctttttctaggaatgtgcttttttttgtacacatttttatccattttacattctaaagcagtgtaagttgtatattactgtttcttatgtacaaggaacaacaataaatcatatggaaatttatatttaaaaaaaaaaaaaaaaaaaaaaaaaaaaaaaaaaaaaaaasggggggccccccnagggggccc

SEQ ID NO: 206 - DNA, 755 bp, Homo sapiens
  misc_feature (368): n equals a,t,g, or c
tcgacccacgcgtccgccagtcgcacatctcagacacctccgtggttgtcaagctggacaacagccgggacctgaacatggactgcatcattgccgagattaaggcacagtatgacgacattgtcacccgcagccgggccgaggccgagtcctggtaccgcagcaagtgtgaggagatgaaggccacggtgatcaggcacggggagaccctgcgccgcaccaaggaggagatcaacgagctgaaccgcatgatccagaggctgacggccgaggtggagaatgccaagtgccagaactccaagctggaggccgcggtggcccagtctgagcagcagggtgaggcggccctcagtgatgcccgctgcaanctggccgagctggagggcgccctgcagaaggccaagcaggacatggcctgcctgatcagggagtaccaggaggtgatgaactccaagctgggcctggacatcgagatcgccacctacaggcgcctgctggagggcgaggagcagaggctatgtgaaggcattggggctgtgaatgtctgtgtcagcagctyccggggcggggtcgtgtgcggggacctctgcgtgtcaggctyccggccagtgactgcagtgtctgcagcgctycgtgcaacgggaacgtggcggtgagcaccggcctgtgtgcgccctgcggcaattgacaccamctgcggagggggttctgcggcgtgggctyctgtggtatcaagyttcccccccctttggggg

SEQ ID NO: 207 - DNA, 1996 bp, Homo sapiens
gggtcgacccacgcgtccgatttagagccgggtaggggagcgcagcrgccagatacctcagcgctacctggcggaactggatttctctcccgcctgccggcctgcctgccacagccggactccgccactccggtagcctcatggctgcaacctgtgagattagcaacatttttagcaactacttcagtgcgatgtacagctcggaggactccaccctggcctctgttccccctgctgccacctttggggccgatgacttggtactgaccctgagcaacccccagatgtcattggagggtacagagaaggccagctggttgggggaacagccccagttctggtcgaagacgcaggttctggactggatcagctaccaagtggagaagaacaagtacgacgcaagcgccattgacttctcacgatgtgacatggatggcgccaccctctgcaattgtgcccttgaggagctgcgtctggtctttgggcctctgggggaccaactccatgcccagctgcgagacctcacttccagctcttctgatgagctcagttggatcattgagctgctggagaaggatggcatggccttccaggaggccctagacccagggccctttgaccagggcagcccctttgcccaggagctgctggacgacggtcagcaagccagcccctaccaccccggcagctgtggcgcaggagccccctccccyggcagctctgacgtctccaccgcagggactggtgcttctcggagctcccactcctcagactccggtggaagtgacgtggacctggatcccactgatggcaagctcttccccagcgatggttttcgtgactgcaagaagggggatcccaagcacgggaagcggaaacgaggccggccccgaaagctgagcaaagagtactgggactgtctcgagggcaagaagagcaagcacgcgcccagaggcacccacctgtgggagttcatccgggacatcctcatccacccggagctcaacgagggcctcatgaagtgggagaatcggcatgaaggcgtcttcaagttcctgcgctccgaggctgtggcccaactatggggccaaaagaaaaagaacagcaacatgacctacgagaagctgagccgggccatgaggtactactacaaacgggagatcctggaacgggtggatggccggcgactcgtctacaagtttggcaaaaactcaagcggctggaaggaggaagaggttctccagagtcggaactgagggttggaactatacccgggaccaaactcacggaccactcgaggcctgcaaaccttcctgggaggacaggcaggccagatggcccctccactggggaatgctcccagctgtgctgtggagagaagctgatgttttggtgtattgtcagccatcgtcctgggactcggagactatggcctcgcctccccaccctcctcttggaattacaagccctggggtttgaagctgactttatagctgcaagtgtatctccttttatctggtgcctcctcaaacccagtctcagacactaaatgcagacaacaccttcctcctgcagacacctggactgagccaaggaggcctggggaggccctaggggagcaccgtgatggagaggacagagcaggggctccagcaccttctttctggactggcgttcacctccctgctcagtgcttgggctccacgggcaggggtcagagcactccctaatttatgtgctatataaatatgtcagatgtacatagagatctattttttctaaaacattcccctccccactcctctcccacagagtgctggactgttccaggccctccagtgggctgatgctgggacccttaggatggggctcccagctcctttctcctgtgaatggaggcagagacctccaataaagtgccttctgggctttttctaaaaaaaaaaaaaaaaaaaaaaaaaaaaaaaaaaaaaaaaaaaaaaaaaaaaaactcgag

SEQ ID NO: 208 - DNA, 1668 bp, Homo sapiens
  misc_feature (1505): n equals a,t,g, or c
  misc_feature (1565): n equals a,t,g, or c
  misc_feature (1598): n equals a,t,g, or c
  misc_feature (1620): n equals a,t,g, or c
cacactgctcgcttcggatactccaggcgtctcccgttgcggccgctccctgccttagaggccagccttggacacttgctgcccctttccagcccggattctgggatccttccctctgagccaacatctgggtcctgccttcgacaccaccccaaggcttcctaccttgcgtgcctggagtctgccccaggggcccttgtcctgggccatggccmagaagggggtcctggggcctgggcagctgggggctgtggccattctgctctatcttggattactccggtcggggacaggagcggaaggggcagaagctycctgcggtgtggccccccaagcacgcatcacaggtggcagcagtgcagtcgccggtcagtggccctggcaggtcagcatcacctatgaaggcgtccatgtgtgtggtggctctctcgtgtctgagcagtgggtgctgtcagctgctcactgcttccccagcgagcaccacaaggaagcctatgaggtcaagctgggggcccaccagctagactcctactccgaggacgccaaggtcagcaccctgaaggacatcatcccccaccccagctacctccaggagggctcccagggcgacattgcactcctccaactcagcagacccatcaccttctcccgctacatccggcccatctgcctccctgcagccaacgcctccttccccaacggcctccactgcactgtcactggctggggtcatgtggccccctcagtgagcctcctgacgcccaagccactgcagcaactcgaggtgcctctgatcagtcgtgagacgtggtaactgcctgtacaacatcgacgccaagcctgaggagccgcactttgtccaagaggacatggtgtgtgctggctatgtggaggggggcaaggacgcctgccagggtgactctgggggcccactctcctgccctgtggagggtctctggtacctgacgggcattgtgagctggggagatgcctgtggggcccgcaacaggcctggtgtgtacactctggcctccagctatgcctcctggatccaaagcaaggtgacagaactccagcctcgtgtggtgccccaaacccaggagtcccagcccgacagcaacctctgtggcagccacctggccttcagctctgccccagcccagggcttgctgaggcccatccttttcctgcctctgggcctggctctgggcctcctctccccatggctcagcgagcactgagctggccctacttccaggatggatgcatcacactcaaggacaggagcctggtccttccctgatggcctttggacccagggcctgacttgagccactccttccttcaggactctgcgggaggctggggccccatcttgatctttgagcccattcttctgggtgtgctttttgggaccatcactgagagtcaggagttttactgcctgtagcaatggccagagcctctggcccctcamccaccatggaccagcccattggscgagntcctggggagtcctgggaccttggytatgaaaatgagccctgggttcccacctgtttctngaagactgcttcccggcccgccttcccagactngatgagcacattttttttgccntttccctgtgtttttgggttgggcaactttttggaagtttgaggagaa

SEQ ID NO: 209 - DNA, 2250 bp, Homo sapiens
  misc_feature (23): n equals a,t,g, or c
gctttaagcaaaaaggtctttangtgacactatagaaggtacgcctgcaggtaccggtccggaattcgcggccgcgtcgacattcgccgccgcagcagccgccgcccccgggagccgccgggaccctcgcgtcgtcgccgccgccgccgcccagatccccgcaccatgccgtcggagaagaccttcaagcagcgccgcaccttcgaacaaagagtagaagatgtccgacttattcgagagcagcatccaaccaaaatcccggtgataatagaacgatacaagggtgagaagcagcttcctgttctggataaaacaaagttccttgtacctgaccatgtcaacatgagtgagctcatcaagataattagaaggcgcttacagctcaatgctaatcaggccttcttcctgttggtgaacggacacagcatggtcagcgtctccacaccaatctcagaggtgtatgagagtgagaaagatgaagatggattcctgtacatggtctatgcctcccaggagacgttcgggatgaaattgtcagtgtaaaaccagaaaaaatgcatctcttctagaattgtttaaacccttaccaaggaaaaaaaaggggtgttaccaactgagatcgatcagttcatccaatcacagatcatgaaacagtagtgttcccacctaggagtgttaggaagttgtgtttgtgtttcaagcagaaaaactgagctccaagtgagcacattcagctttggaaactatattatttaatgtaggctagcttgttttcaaattttaaaagtttaaaaataaaatactttgcattctaagttgccaataaaatagaccttcaagttattttaatgctcttttctcactaataggaacttgtaattccagcagtaatttaaaggctttcagagagaccctgagtcttctcttcaggttcacagaacccgccgcctttttgggtagaagttttctactcagctagagagatctccctaagaggatctttaggcctgagttgtgaagcgcaacccccgcaaaacgcatttgccatcacagttggcacaaacgcagggtaaacgggctgtgtgagaaaacggccctgactgtaaactgctgaaggtccctgactcctaagagaaccacacccaaagtcctcactcttgcaggggtagacatttctggtttggtttgttctctagatagttacacacataaagacaccactcaaaaggaaacttgaataatttataattttgatcgagtttcttaaaagaccctggagaaagagtggcatttcttctgtttcaggttttgtctgagttcaaactagtgcctgtgttgttacggaaagcagcagtgtaccagtgtcactctggagtacagcgggagaaacacaaaatagtataactgaaaacattaacattcagacacactcccttctgccttccggcttaaagctgtggatgatccacgtttttgtttttttaatgttaaatgtgtaactcagtattactgaaaaggtacccacattttgaatagtagttatcactcttaggtcagacagccatcagaattctcccacaccaagtgcatgtcagttgtggagaaaacatagcaaaaagagccgtacgctctttacagatactaatgtcaagagttaaacctcctcaggttcaacctgtgataaaagactagtgcttcccagtacttgcatggggttcactatttatagttttcttgggagtatcacaggaaaatcacaattacaccactttagaccctatgtgtagcaggtcacaacttacccttgtgtgtttagatgtgtatgaaatacctgtatacgttagtgaaagctgtttactgtaacggggaaaaccagattctttgcatctgggccctctactgattgttaaaggagttcctgtcacctgctccccccacccccgcatgcgtctgtccacttggctaacttttaatatgtgtatttttacattatgtatattcttaactggactgtctcgtttagactgtatacatcatatctgacattattgtaactaccgtgtgatcagtaagattcctgtaagaaatactgctttttaagaaaaaaaataacatgctgaggggtgacctatatcccatgtgagtggtcactttatttataggatctttaaaacatttttaatgaactaagttgaataaaggcacaattaaaaactgtcaaaaaaaaaaaaaaaaaaaaaaaaaaaaaaa

SEQ ID NO: 210 - DNA, 838 bp, Homo sapiens
ggcgggcctacgtgctccgcccgctgtgagcctgtccggcccccgcccgctccggagcaacccgcgagcttacaccggcttctctctgtcctcagcccgcgcgccgccatcgccgtcatgctgggcgccgctctccgccgctgcgctgtggccgcaaccacccgggccgaccctcgaggcctcctgcactccgcccggacccccggccccgccgtggctatccagtcagttcgctgctattcccatgggtcacaggagacagatgaggagtttgatgctcgctgggtaacatacttcaacaagccagatatagatgcctgggaattgcgtaaagggataaacacacttgttacctatgatatggttccagagcccaaaatcattgatgctgctttgcgggcatgcagacggttaaatgattttgctagtacagttcgtatcctagaggttgttaaggacaaagcaggacctcataaggaaatctacccctatgtcatccaggaacttagaccaactttaaatgaactgggaatctccactccggaggaactgggccttgacaaagtgtaaaccgcatggatgggcttccccaaggatttattgacattgctacttgagtgtgaacagttacctggaaatactgatgataacatattaccttatttgaacaagttttcctttattgagtaccaagccatgtaatggtaacttggactttaataaaagggaaatgagtttgaactgaaaaaaaaaaaaaaaaaaactcatacagactgaagcgcggtgattaaataatgaaagagttcgacgcggccgggaatttaggaggtaaatatcc

SEQ ID NO: 211 - DNA, 1213 bp, Homo sapiens
  misc_feature (1206): n equals a,t,g, or c
gcccacgcgtccggcaggaaccgcggctgctggacaagaggggtgcggtggatactgacctttgctccggcctcgtcgtgaagacacagcgcatctccccgctgtaggcttcctcccacagaacccgtttcgggcctcagagcgtctggtgagatgctgttgccgctgctgctgctgctacccatgtgctgggccgtggaggtcaagaggccccggggcgtctccctcaccaatcatcacttctacgatgagtccaagcctttcacctgcctggacggttcggccaccatcccatttgatcaggtcaacgatgactattgcgactgcaaagatggctctgacgagccaggcacggctgcctgtcctaatggcagcttccactgcaccaacactggctataagcccctgtatatcccctccaaccgggtcaacgatggtgtttgtgactgctgcgatggaacagacgagtacaacagcggcgtcatctgtgagaacacctgcaaagagaagggccgtaaggagagagagtccctgcagcagatggccgaggtcacccgcgaagggttccgtctgaagaagatccttattgaggactggaagaaggcacgggaggagaagcagaaaaagctcattgagctacaggctgggaagaagtctctggaagaccaggtggagatgctgcggacagtgaaggaggaagctgagaagccagagagagaggccaaagagcagcaccagaagctgtgggaagagcagctggctgctgccaaggcccaacaggagcaggagctggcggctgatgccttcaaggagctggatgatgacatggacgggacggtctcggtgactgagctgcagactcacccggagctggacacagatggggatggggcgttgtcagaagcggaagctcaggccctyctcagtggggacacacagacagacgccacctctttctacgaccgcgtctggggcccaggcggggctggtccacattcccaggccccaacagccttcaaagatgggtaaaggagcttgccctccctgggccccccaccttggtgactcgccccaccacccccagccctgtccctgccacccctcctagtggggactagtgaatgacttgacctgtgacctcaatacaataaatgtgatcccccacccaaaaaaaaaaaaaaaaaaaaaaaaaaaaaaaaaaaaaanaaaaaaa

SEQ ID NO: 212 - DNA, 969 bp, Homo sapiens
  misc_feature (922): n equals a,t,g, or c
  misc_feature (955): n equals a,t,g, or c
  misc_feature (958): n equals a,t,g, or c
ccactgcttcccatgggcagtcttgctcatatcctgggagctcctgttctttcagacccaaaggaacccaagcagaaatctttgtatgtatatgtatgaagaggttgtctgtttttaggagttgtatgtaaaagctaaggaaaccttttcttttggaagatcagtataaacatgctgcttttggtaaaattcttttgagccattttcatctaaatataacttctgtttcatttttttttctaaatataactcagagtttaatgagggcttttcacatggaacaagcttttgagagggcctgtgttgctgaagttttcgcccttggattgctggggtgatattggtgacaaactctgtagggaaggactgggaacctgtcaatcttttttctttggttgggtggattgggcagggaatagctgacttgatttgttataagtttggaaggttatagtttggtcacattcttcattgatcacacttttagggattcttgaagaaaagggaagcaaaacatacacacacacccccacccaatctaacagcgtattcaagcagattccacgaatcctcggcccaggtttaaataaggcaggaaagttcccttccctgctcacacacaacgaaaacatggtggccaaagtggatgaggtgaagtccacaatcaagttccaaatgaagaaggtgttatgtctggctgtagctgttggtcacgtgaagatgacagacgatgagcttgtgtataacattcacctggctgtcaacttcttggtgtcattgctcaagaaaaactggcagaatgtccgggccttatatatcaagagcaccatgggcaagccccagcgcctatattaaggcacatttgaataaattctattaccagttaaaaaaaaaaaaaaaaaaaaaaaaaaaaaaaaaaaanaaaaaaaaaaaaaaaaaaaaaaaaaaaaaaaanccncgggggggggg

SEQ ID NO: 213 - DNA, 1694 bp, Homo sapiens
ggcacgagagaagaggcgggagtggacctggtcagccctaccccactgaccccaccggacccaggcgcggcctccgccacagccacagcccctgcccctgctgcggcgcggcgaggcgaggcgatggccaaggtgtcggtgctgaacgtggcggtcctggagaacccgagccctttccacagccccttccggttcgagatcagcttcgagtgcagtgaagccctggcggacgacctggagtggaagatcatttatgttggctcggctgagagtgaggaatttgatcagatcctagactcggtgctggtgggccctgtgccagcagggagacacatgtttgtctttcaggccgacgcccccaacccatccctcatcccagagactgatgccgtgggtgtgactgtggtcctcatcacctgcacctaccatggacaggagttcatccgagtgggctactacgtcaacaacgagtacctcaaccctgagctgcgtgagaacccgcccatgaagccagatttctcccagctccagcggaacatcttggcctcgaacccccgggtgacccgcttccatatcaactgggacaacaacatggacaggctggaggccatagagacccaggacccctccctgggctgcggcctcccactcaactgcactcctatcaagggcttggggctccctggctgcatccctggcctcctccctgagaactccatggactgcatctaactgcaggaacccagagtgtcccagcacgccgggaggggcaaccaggcctcccagcgagtcctgcagggcccatctagaggaytttgggggccatcagcttgcaatccaggtctgtcaaactcagcccytaggaaagaacaggccttgggtytyccctagtcctggccagaaggatgatctcgcttttcctctacaggcctataagaagcaggtacttcagttctaaattctgacttgtgttcttttcgtcttcataaattctaactaaggccactgtgccactgtgcacccttgagtaccattgatccaaagctttcccacagacctccctggcccacctagaggctttcttggtcagtgcctgtcaaggytccagtcctgctgagccaaaggctttgtcattcctttctcttcctgtacatctgagcagacccactccagctttctggtgtcacaggcgggaatgttagttagtaggtagacttagatcccatttctgtcctgctcccaggaagattcttaggtcctcttcaatccagcagcccctcccagaggtgtgatcagcaggatgctgaggaaccatgttgcctttcctgtcaatcacagccaccttcctgttatctcctaaatggatctggcttttcctggaggctgccatggttggaagatggtatcagagggcctgcctgggcagtctgtctccgggccagggtcagggaccctctkcctctggcagccttaacctgtcctctgctaggaccagggtgatttcaagccagggaagcaactgggaccctgaaaactgtccctccccagcccgctccccctctctgtgccctggtccccttgctgccatgtggatgctgttgtgattgctgtttgtatattatcaaaatgtttttatattaaaaatgtttggtctgaaaattaaaagcacttcatttgaaaaaaaaaaaaaaaaa

SEQ ID NO: 214 - DNA, 1210 bp, Homo sapiens
ggcacgagccgcggcgtctcctccsggacgctgaggggcccgaggagaccgtgaggctctggcctgcagctcgcgccgccatggacgctgccgaggtcgaattcctcgccgagaaggagctggttaccattatccccaacttcagtctggacaagatctacctcatcgggggggacctggggccttttaaccctggtttacccgtggaagtgcccctgtggctggcgattaacctgaaacaaagacagaaatgtcgcctgctccctccagagtggatggatgtagaaaagttggagaagatgagggatcatgaacgaaaggaagaaacttttaccccaatgcccagcccttactacatggaacttacgaagctcctgttaaatcatgcttcagacaacatcccgaaggcagacgaaatccggaccctggtcaaggatatgtgggacactcgtatagccaaactccgagtgtctgctgacagctttgtgagacagcaggaggcacatgccaagctggataacttgaccttgatggagatcaacaccagcgggactttcctcacacaagcgctcaaccacatgtacaaactccgcacgaacctccagcctctggagagtactcagtctcaggacttctagagaaaggcctggtgcaggcggcttgctgggggatgtgagcgctcaggacgtgatgaggtactcgtggttctggagctctagaaacacttctgatgcatgaaaaatgtgtgatggtgcaaggaatggattcaggatgttgttggagaaacaagtttgtgattagtccttaaaacttagctccctgggacattcttcaattccacatctgtttctagaaaccagccctttttccccccacttttgagaaataaaaaagccttaggtaaataagtcattctccctagcagagccacttgggtctcctgcatggaagccatcacacttgggcaggtgttcagtgactggtaggtgtagatacagcaggagtggccatgtggtccacggctttttaccccttcttgatcctsatttcttgggctgaatttagactctctcacagaggtggctcacagagaaggatggcagatggtgcagccaacaatgctgaccggtgcttatcctctaagccctgatccacaataaaaatggacccaactcaaaaaaaagagagagagagagagagagagagagac

SEQ ID NO: 215 - DNA, 1776 bp, Homo sapiens
agctggcccggacgccagaaaatgttccacgtgggataccctgcgtgggkttcactgtagtagctgcactaggtgattcttggagcgggcctgagagacaaggacatgtggatcccagtggtcgggcttcctcggcggctgaggctctccgccttggcgggcgctggtcgcttttgcattttagggtctgaagcggcgacgcgaaagcatttgccggcgaggaaccactgtgggctctctgactcctctccgcagctgtggcccgaaccggatttcaggaatccgccaaggaaggcgtctaaggccagcttagactttaagcgttacgtaaccgatcggagattggctgagaccctggcgcaaatctatttgggaaaaccaagtagacctccacacctactgctggagtgcaatccaggtcctggaatcctgactcaggcattacttgaagctggtgccaaagtggttgcgctcgaaagtgacaaaacttttattccacatttggagtccttaggaaaaaatctggatggaaaactacgagtgattcactgtgacttctttaaactagatcctagaagtggtggagtaataaaaccacctgctatgtcttctcgagggctctttaagaatttgggaatagaagcagttccttggacagcagacatccctttaaaagtagttggaatgttcccaagtagaggtgagaaaagggcactttggaaactcgcatatgacttgtattcctgtacttctatatataaatttggacgaatagaagtaaatatgtttattggtgaaaaagaattccagaaactaatggcagatccyggaaatccagacttgtatcatgtattaagtgttatctggcaattagcttgtgagattaaggttctgcacatggagccttggtcatcatttgatatatacacccggaaagggccgctggaaaacccaaagcgtagggaattattagaccaattacaacaaaagctgtatcttattcaaatgattcctcgtcaaaatttatttaccaagaacttaacacctatgaactataatatattttttcacttgttaaagcactgtttygggaggcgcagsgccactgtaatagaccacttacgttcattgactccacttgatgcgagagatatattgatgcaaataggaaaacaggaggatgagaaagtagttaacatgcaccctcaagacttcaaaacactttttgaaactatagagcgttccaaagattgtgcttataaatggctgtatgatgaaaccctggaagataggtagcaactagactgtcgtttttggtggagcggttcatttatttggaaactatgacatgaaaaccaaatttgaaaactcacatcctttcagcagaaggtaactgttcttgtcttgcacaagccaggcagatcatttctcctaagctgatatcattggcttattggatgaaacagtgtctgctattttattcacaattgaataaaatgaaaacttcaattaattgtggatttgatcagattgaattcgttttgtttcagattcctatttaaatatttcacttgtactgttgctgatttttgcatcttcttgaagagcaagagtctgtacattattaagcttagaaagtaagcaaaactgatttactggtttgcctttcagtttgttgaaatgtattgtcaagtactgtacaatgaaattgtttaaattttaatatgatttaagctttttagaaattaaaatattttaaataagaaaaaaaaaaaa

SEQ ID NO: 216 - DNA, 1418 bp, Homo sapiens
agggtttcctggataggcttgctgaagatgaaggggacagtgagccagaggccgttggacagtccaggggagaagacagaagaagtagagaggcagggcctggtgacagtatcagtgagtgccatacagaattgtgtattcaccagcatcatgaaacagttgtggtcttttgagttgatcttggcagagtaaagggacgtgtcctggagccattcctgaatctccccttctttgtgacagctcctcccacccccccaaaaaataaaaaaaccacaaaaaacaaaaaaacaaaactaaggcacttcacttagagactggagtcctgcttataatcatgcatataacctttactttgatggatctggccagaggggtgttggagcccagcccacccacataccagtcaagctcttaggggagcagaagaaaagcaggaagaatttaaatgtttaattttttttttaaattgacttttctagttattaaaagttgcttgtttcagcagtgatattgtataaagaacatcttgtaagatactcctgacatcttgctttagcacatgtacagtacagtttctatgataatgtgtttgctctaacttccctggcttctccttcagcccatccactctcctctagagcagttgggttggaggctcattgaggcaagcagcaacattggagggggagcagggcagtgctgtgtctgctgcctcccatgcccgttctgacctcagccttggaactcctcaagaacctgaagattccagtggtcagtgtcggtggggggtgggaggagagagcggcagagaagctctgagagccccttcccccacaacaaatctagctctagttgttatatttaggcaaaactttgtagtcttctttcccttttatgatggattttgataaaagtacaaaacagggtttttcttttttatcacctttgaatttggaaattttgagcacccaagctcttctgtacctatttaaagtccaccaaggggactgcagctcctagaacatgagaatcaagcctcttaattttaaactgcggaatgtggcctctgcttcctccgtcctcctgcccaaggacgacgaggattgctccagggctgctgggtagtttaccgtcccttctataggcatggagttggcactgacatcacagcttcataaccccaccaccgccagcttcccctgcctcctacatccagtctgttcttgttcatagtgagaatcctgtgttcccacttcagtgacacctgaattgtttgttgttgttttttttttttattgtcttcaaagaggaagggccccattaaagggtgaacttgtaataaattggaatttcaaataaacctcatgtacttgtgtttataaagaagaaaaaaaaaaaaaaaaaaaaaaaaaaaaaaa

SEQ ID NO: 217 - DNA, 2200 bp, Homo sapiens
  misc_feature (2188): n equals a,t,g, or c
gggcacgaggcccagttcctgttcccagactgaggcccagcccccttcgcccgtttccatcacgagtgccgccagcatgtctgacaaactgccctacaaagtcgccgacatcggcctggctgcctggggacgcaaggccctggacattgctgagaacgagatgccgggcctgatgcgtatgcgggagcggtactcggcctccaagccactgaagggcgcccgcatcgctggctgcctgcacatgaccgtggagacggccgtcctcattgagaccctcgtcaccctgggtgctgaggtgcagtggtccagctgcaacatcttctccacccaggaccatgcggcggctgccattgccaaggctggcattccggtgtatgcctggaagggcgaaacggacgaggagtacctgtggtgcattgagcagaccctgtacttcaaggacgggcccctcaacatgattctggacgacgggggcgacctcaccaacctcatccacaccaagtacccgcagcttctgccaggcatccgaggcatctctgaggagaccacgactggggtccacaacctctacaagatgatggccaatgggatcctcaaggtgcctgccatcaatgtcaatgactccgtcaccaagagcaagtttgacaacctctatggctgccgggagtccctcatagatggcatcaagcgggccacagatgtgatgattgccggcaaggtagcggtggtagcaggctatggtgatgtgggcaagggctgtgcccaggccctgcggggtttcggagcccgcgtcatcatcaccgagattgaccccatcaacgcactgcaggctgccatggagggctatgaggtgaccaccatggatgaggcctgtcaggagggcaacatctttgtcaccaccacaggctgtattgacatcatccttggccggcactttgagcagatgaaggatgatgccattgtgtgtaacattggacactttgacgtggagatcgatgtcaagtggctcaacgagaacgccgtggagaaggtgaacatcaagccgcaggtggaccggtatcggttgaagaatgggcgccgcatcatcctgctggccgagggtcggctggtcaacctgggttgtgccatgggccaccccagcttcgtgatgagtaactccttcaccaaccaggtgatggcgcagatcgagctgtggacccatccagacaagtaccccgttggggttcatttcctgcccaagaagctggatgaggcagtggctgaagcccacctgggcaagctgaatgtgaagttgaccaagctaactgagaagcaagcccagtacctgggcatgtcctgtgatggccccttcaagccggatcactaccgctactgagagccaggtctgcgtttcaccctccagctgctgtccttgcccaggccccacctctcctccctaagagctaatggcaccaactttgtgattggtttgtcagtgtcccccatcgactctctggggctgatcacttagtttttggcctctgctgcagccgtcatactgttccaaatgtggcagcgggaacagagtaccctcttcaagccccggtcatgatggaggtcccagccacagggaaccatgagctcagtggtcttggaacagctcactaagtcagtccttccttagcctggaagtcagtagtggagtcacaaagcccatgtgttttgccatctaggccttcacctggtctgtggacttatacctgtgtgcttggtttacaggtccagtggttcttcagcccatgacagatgagaaggggctatattgaagggcaaagaggaactgttgtttgaattttcctgagagcctggcttagtgctgggccttctcttaaacctcattacaatgaggttagtacttttagtccctgttttacaggggttagaatagactgttaaggggcaactgagaaagaacagagaagtgacagctaggggttgagaggggccagaaaaacatgaatgcaggcagatttcgtgaaatctgccaccactttataaccagatggttcctttcacaaccctgggtcaaaaagagaataatttggcctataatgttaaaagaaagcaggaaggtgggtaaataaaaatcttggtgcctggaaaaaaaaaaaaaaaaaaaaraaaraaaaaaaaaaaaaaaaaaaaaaanaaaaaaaaaaaa

SEQ ID NO: 218 - DNA, 1853 bp, Homo sapiens
  misc_feature (890): n equals a,t,g, or c
  misc_feature (1794): n equals a,t,g, or c
gggaaggagtcatggcggatggtcaggtggcggaactgctgctccggcggctggaggcgtctgatggcggcctggacagcgccgagttggcggctgagctgggcatggagcaccaggcggtggtgggcgccgtgaagagccttcaggcgctgggcgaggtcatcgaggctgaacttcggtccaccaagcactgggagcttactgcggagggcgaggagattgcccgggagggcagccatgaggcccgtgtgtttcgaagcattcccccagagggcctggcccagagcgagcttatgcgactgcccagtggcaaagtgggcttcagcaaggccatgtccaacaagtggattcgggtggacaagagtgcggctgacgggccccgggtgttccgagtggtggacagcatggaggatgaggtgcagcggcggctccagctggtccgggggggacaggctgagaagctgggggagaaggagaggagcgagctgaggaagaggaagctgttggctgaagtgactctgaagacctactgggtgagcaaaggcagtgcctttagtaccagcatctccaagcaagagacagagctgagcccagagatgatctccagtggctcttggcgggaccggcccttcaagccctacaacttcttggcccacggtgtcctccccgacagcggccaccttcacccgctgctcaaggtccgctcccagttccgacagatcttcctggagatggggttcaccgagatgccgactgataacttcattgagagctccttctggaactttgacgccctcttccagccccagcagcacccagcccgtgaccagcacgacaccttcttccttcgagatccagcggaggccctgcagctcccaatggactatgtncagcgggtcaagcggacccactctcagggcggctacggctcacaggggtacaagtataactggaagctggacgaggcccggaaaaacctactgcgaacccacaccacatcagccagcgcccgtgcgctctaccgccttgcccagaagaagcccttcactccggtcaagtacttctccatcgaccgcgtattccggaatgagaccctggacgccacgcacctggctgagttccaccagatcgagggcgtggtggcggatcatggtctcaccttgggccacctcatgggcgttctgcgggagttcttyaccaagctgggtatcacgcaactccgcttcaagccagcctacaacccatacacagagcccagcatggaggtgttcagctaccaccaaggcctgaagaagtgggtggaggtcggaaactcgggggtcttccgtccagagatgctgctgcccatggggcttcccgagaacgtgtcggtcattgcctggggcctctccctggagcgcccaacgatgatcaaatatggcatcaacaatatccgggagctggtgggccacaaggtgaacctgcagatggtgtatgacagtcccctgtgccgcctggatgccgagccgaggccccctcccacacaggaggctgcgtgacatgggccactctaggacaggtcatcctccccgagtccctgctgctgcgctcctttgcatccctggccagtgaccttgtatttatgaggcctctgtgaggccagcccccaccttcctctttcccacctgtcccaggaccagaatcccagggacagaggactgggtagcaggttccttctgttgtcctgtgtggtgtgtctactgtgagggtgggccctgaggagacctgtgggccacctattgtctaataaagtgngcagttgcccccaaaaaaaaaaaaaaaaaaaaaaaaaaaaaaaaaaaaaaaaaaaaaaa

SEQ ID NO: 219 - DNA, 1093 bp, Homo sapiens
  misc_feature (1090): n equals a,t,g, or c
  misc_feature (1091): n equals a,t,g, or c
  misc_feature (1092): n equals a,t,g, or c
gcgtgcggcgtctacaccccgcgctgcgccaggggctgcgctgctatccccacccgggctccgagctgcccctgcagcgctggtcatgggcgagggcacttgtgagaagcgccgggacgccgagtatggcgccagcccggagcaggttgcagacaatggcgatgaccactcagaaggaggcctggtggagaaccacgtggacagcaccatgaacatgttgggcgggggaggcagtgctggccggaagcccctcaagtcgggtatgaaggagctggccgtgttccgggagaaggtcactgagcagcaccggcagatgggcaagggtggcaagcatcaccttggcctggaggagcccaagaagctgcgaccaccccctgccaggactccctgccaacaggaactggaccaggtcctggagcggatctccaccatgcgccttccggatgagcggggccctctggagcacctctactccctgcacatccccaactgtgacaagcatggcctgtacaacctcaaacagtgcaagatgtctctgaacgggcagcgtggggagtgctggtgtgtgaaccccaacaccgggaagctgatccagggagcccccaccatccggggggaccccgagtgtcatctcttctacaatgagcagcaggaggctcgcggggtgcacacccagcggatgcagtagaccgcagccagccggtgcctggcgcccctgccccccgcccctctccaaacaccggcagaaaacggagagtgcttgggtggtgggtgctggaggattttccagttctgacacacgtatttatatttggaaagagaccagcaccgagctcggcacctccccggcctctctcttcccagctgcagatgccacacctgctccttcttgctttccccgggggaggaagggggttgtggtcggggagctggggtacaggtttggggagggggaagagaaatttttatttttgaacccctgtgtcccttttgcataagattaaaggaaggaaaagtaaaaaaaaaaaaaaaaaaaaaaaaaaaaaaaaaaaaaaaaaaaaaaaaaaaaaaaaaaaaaaaaaaaaaaaannna

SEQ ID NO: 220 - DNA, 2155 bp, Homo sapiens
acccacgcgtccgctagagagggattttmcggtctcgtgggcagaggaacaaccaggaacttgggctcagtctccaccccacagtggggcggatccgtcccggataagacccgctgtctggccctgagtagggtgtgacctccgcagccgcagaggaggagcgcasccggcctcgaagaacttctgcttgggtggctgaactctgatcttgacctagagtcatggccatggcaaccaaaggaggtactgtcaaagctgcttcaggattcaatgccatggaagatgcccagaccctgaggaaggccatgaaagggctcggcaccgatgaagacgccattattagcgtccttgcctaccgcaacaccgcccagcgccaggagatcaggacagcctacaagagcaccatcggcagggacttgatagacgacctgaagtcagaactgagtggcaacttcgagcaggtgattgtggggatgatgacgcccacggtgctgtatgacgtgcaagagctgcgaagggccatgaagggagccggcactgatgagggctgcctaattgagatcctggcctcccggacccctgaggagatccggcgcataagccaaacctaccagcagcaatatggacggagccttgaagatgacattcgctctgacacatcgttcatgttccagcgagtgctggtgtctctgtcagctggtgggagggatgaaggaaattatctggacgatgctctcgtgagacaggatgcccaggacctgtatgaggctggagagaagaaatgggggacagatgaggtgaaatttctaactgttctctgttcccggaaccgaaatcacctgttgcatgtgtttgatgaatacaaaaggatatcacagaaggatattgaacagagtattaaatctgaaacatctggtagctttgaagatgctctgctggctatagtaaagtgcatgaggaacaaatctgcatattttgctgaaaagctctataaatcgatgaagggcttgggcaccgatgataacaccctcatcagagtgatggtttctcgagcagaaattgacatgttggatatccgggcacacttcaagagactctatggaaagtctctgtactcgttcatcaagggtgacacatctggagactacaggaaagtactgcttgttctctgtggaggagatgattaaaataaaaatcccagaaggacaggaggattctcaacactttgaatttttttaacttcatttttctacactgctattatcattatctcagaatgcttatttccaattaaaacgcctacagctgcctcctagaatatagactgtctgtattattattcacctataattagtcattatgatgctttaaagctgtacttgcatttcaaagcttataagatataaatggagattttaaagtagaaataaatatgtattccatgtttttaaaagattactttctactttgtgtttcacagacattgaatatattaaattattccatattttcttttcagtgaaaaattttttaaatggaagactgttctaaaatcacttttttccctaatccaatttttagagtggctagtagtttcttcatttgaaattgtaagcatccggtcagtaagaatgcccatccagttttctatatttcatagtcaaagccttgaaagcatctacaaatctctttttttaggttttgtccatagcatcagttgatccttactaagtttttcatgggagacttccttcatcacatcttatgttgaaatcactttctgtagtcaaagtataccaaaaccaatttatctgaactaaattctaaagtatggttatacaaaccatatacatctggttaccaaacataaatgctgaacattccatattattatagttaatgtcttaatccagcttgcaagtgaatggaaaaaaaaataagcttcaaactaggtattctgggaatgatgtaatgctctgaatttagtatgatataaagaaaacttttttgtgctaaaaatactttttaaaatcaattttgttgattgtagtaatttctatttgcactgtgcctttcaactccagaaacattctgaagatgtacttggatttaattaaaaagttcactttgtaaaaaaaaaaaaawaaaaaaaaac

SEQ ID NO: 221 - DNA, 1264 bp, Homo sapiens
  misc_feature (4): n equals a,t,g, or c
  misc_feature (5): n equals a,t,g, or c
  misc_feature (7): n equals a,t,g, or c
  misc_feature (17): n equals a,t,g, or c
  misc_feature (22): n equals a,t,g, or c
  misc_feature (125): n equals a,t,g, or c
gtcnncngacagtgacngtacngtattcccgggtcgacccacgcgtccggtaaaattctgggctctggtatcagttcctcttcagtattgcatggcatggtttttaagaaggaaaccgaagtgantgtaacatctgtcaaagatgcaaaaatagcagtgtactcttgtccttttgatggcatgataacagaaactaagggaacagtgttgataaagactgctgaagaattgatgaattttagtaagggagaagaaaacctcatggatgcacaagtcaaagctattgctgatactggtgcaaatgtcgtagtaacaggtggcaaagtggcagacatggctcttcattatgcaaataaatataatatcatgttagtgaggctaaactcaaaatgggatctccgaagactttgtaaaactgttggtgctacagctcttcctagattgacacctcctgtccttgaagaaatgggacactgtgacagtgtttacctctcagaagttggagatactcaggtggtggtttttaagcatgaaaaggaagatggcgccatttctaccatagtacttcgaggctctacagacaatctgatggatgacatagaaagggcagtagacgatggtgttaatactttcaaagttcttacaagggataaacgtcttgtacccggaggtggagcaacagaaattgaattagccaaacagatcacatcatatggagagacatgtcctggacttgaacagtatgctattaagaagtttgctgaggcatttgaagctattccccgcgcactggcagaaaactctggagttaaggccaatgaagtaatctctaaactttatgcagtacatcaagaaggaaataaaaacgttggattagatattgaggctgaagtccctgctgtaaaggacatgctggaagctggtattctagatacttacctgggaaaatattgggctatcaaactcgctactaatgctgcagtcactgtacttagagtggatcagatcatcatggcaaaaccagctggtgggcccaagcctccaagtgggaagaaagactgggatgatgaccaaaatgattgaaattggcttaatttttactgtaggtgaaggctgtatttgtagtagtactcaagaatcacctgatgttttcttattctccttaaattaagagttattttgtgtttgtattcttggctggatgttataataaacatattgttactgtcaaaaaaaaaaaaaaaaaaaaaaaaaaaaaaaaaaa

SEQ ID NO: 222 - DNA, 2085 bp, Homo sapiens
ccttgggagaggaggaacaggcccttgggcagatgcaggcattaccagcagggagcagacttacctccgaagatggagacaggtgactgagagctgcaggcctcctctgctcttccaaacacgtagcatttgcacccctccaaagccatctttgtaaaggaaaacgtatttgtaattgaatccagaagaatttagttacacatagacataactcttcaaccttaactatggcaatacatttgtgctttaactgttacatagcagtatcaccacttaccaggatccaaatcgaaataataaaagctgtctccatagtttaaaatcgaatagtgccatcatcacagtatattagtcaaatagaagcttcatcagaaatgtatcccacatagagttttaagacttggattctcttctgcccttgttaatctccaactaattactacagattgacacgtttttaattagctgtcctttgtaagaagtcaggaaatctgatgctgtgtccaaaattatgcactgtttgttgaagtagaaccagaaatcctgacctcctgttaaatgacatcagtttccccctctgagcaacagactgcttgtcttgctaggagaggaggatggggggctgagcactcaggctgtccattgaaaccccttgtccatgaatagggtcatactcctaagactgatggggtgttgatcttctaggacatcacttgtttattcagtgccccaaacacagatttctcttctagcactttagagttgatccttgaagtctctcctggttcattcaaatacaagctgtgtgagtctggtggttttctgtgattggtctaatgtgagctctttgaacagacagatctgacagtgaatgactctcccctgcttctggcataactgctttgcctctgtctagtgtccaagcatcttagctgttcaagaggagagggcagcataacttcctgaccaccggtgtcagatatcagagcattctggactcctgagaggcagtggcctcttgagtgaacaggggaggccagtagatgccccagatccagagccgtggctgcaaatccagcaggaataaggagggacaaccacagcctcctcatccatgtgtcatttccaagggtttgccttgtgtctcagctcattctgggcagcacgtttgtcttctgtccctagagatttgaaggattttggactcttgtgaatgggtgactggacttggctttacagagttgggtgcttttttctctctgcaattacctgtcatagcattttgtgctcaccacgaaggatggtctctgccttctcttgtcggtgtatgccatctgaacctaggaacacaaagtatattggcctcaaacggagacccagggttgccagttttccgtgggccttcccctcccttgaaatgtctttaattacctccccttcatcgtcaggccacgtgtgacttctgttcttagcactgccagggtcattgacttccatctaagcttgcatcaggaagatgttccttctgtgatcattggtactgaagccagaaaagctctcattcaggaactctgaagagcaaaaagggacaaacactaactgctgagctgggccatttgatctcctttcaccttgcattgctgtcacagcaccttgtatgatggcaggacaggctccagcagagagaactgcacagtgaccactgtatttttcacgctcttccagggatccctgtcccccgacattgaagagatctcattcaggccagagacacagagaccacatagcccagtgattaaaccccggtttcactctggccccaggagtggagcctggccactcctgtttggttctcactgggaggcccactggccttggatcatctcctcatgcacacccggagttttacctgcttgcttgctttcctggactgctgtttgcaagaaagtaactaaaacatgaaaagtaaacctccagcttccacagtatattacctgccgttgcatgcatttgaaagttarcctcctcccttgccaccgtcttkgtggcagtagcggatgcaagaatggatgggagctttccgag

SEQ ID NO: 223 - DNA, 2921 bp, Homo sapiens
  misc_feature (1609): n equals a,t,g, or c
  misc_feature (2919): n equals a,t,g, or c
  misc_feature (2920): n equals a,t,g, or c
  misc_feature (2921): n equals a,t,g, or c
aaaaaaaaaaaaaaaaagaaaaaaagaaagaaagaaaagaaaggagcagggaggtagagccctctgtaccctccatcaccagaaaaagctgaagaggggctgagtaggagggacagatgctggccagggcacaggttttgaagcataaaactcttgccctgtttgctgactcgttgagacagggtgcccagaaggggatagacttccctggggcgtggggagagcaggaggctcaagtgagatgctcttggtgctagaaaccgccctccctcatgcctggggtctctccctgccaggaccctgmcccgcttaggctctgccctgtctcatcccagcccaacagcatggtggtggaacaccccgagttcctcaaggcagggaaggagcctggcctgcagatctggcgtgtggagaagttcgatctggtgcccgtgcccaccaacctttatggagacttcttcacgggcgacgcctacgtcatcctgaagacagtgcagctgaggaacggaaatctgcagtatgacctccactactggctgggcaatgagtgcagccaggatgagagcggggcggccgccatctttaccgtgcagctggatgactacctgaacggccgggccgtgcagcaccgtgagtccagggcttcgagtcggccaccttcctaggctacttcaagtctggcctgaagtacaagaaaggaggtgtggcatcaggattcaagcacgtggtacccaacgaggtggtggtgcagagactcttccaggtcaaagggcggcgtgtggtccgtgccaccgaggtacctgtgtcctgggagagcttcaacaatggcgactgcttcatcctggacctgggcaacaacatccaccagtggtgtggttccaacagcaatcggtatgaaagactgaaggccacacaggtgtccaagggcatccgggacaacgagcggagtggccgggcccgagtgcacgtgtctgaggagggcactgagcccgaggcgatgctccaggtgctgggccccaagccggctctgcctgcaggtaccgaggacaccgccaaggaggatgcggccaaccgcaagctggccaagctctacaaggtctccaatggtgcagggaccatgtccgtctccctcgtggctgatgagaaccccttcgcccagggggccctgaagtcagaggactgcttcatcctggaccacggcaaagatgggaaaatctttgtctggaaaggcaagcaggcaaacacggaggagaggaaggctgccctcaaaacagcctctgacttcatcaccaagatggactaccccaagcagactcaggtctcggtccttcctgagggcggtgagaccccactgttcaagcagttcttcaagaactggcgggacccagaccagacagatggcctgggcttgtcctacctttccagccatatcgccaacgtggagcgggtgcccttcgacgccgccaccctgcacacctccactgccatggccgcccagcacggcatggatgacgatggcacaggccagaaacagatctggagaatcgaaggttccaacaaggtgcccgtggaccctgccacatatggacagttctatggaggcgacagntacatcattctgtacaactaccgccatggtggccgccaggggcagataatctataactggcagggtgcccagtctacccaggatgaggtcgctgcatctgccatcctgactgctcagctggatgaggagctgggaggtacccctgtccagagccgtgtggtccaaggcaaggagcccgcccacctcatgagcctgtttggtgggaagcccatgatcatctacaagggcggcacctcccgcgagggcgggcagacagcccctgccagcacccgcctcttccaggtccgcgccaacagcgctggagccacccgggctgttgaggtattgcctaaggctggtgcactgaactccaacgatgcctttgttctgaaaaccccctcagccgcctacctgtgggtgggtacaggagccagcgaggcagagaagacgggggcccaggagctgctcagggtgctgcgggcccaacctgtgcaggtggcagaaggcagcgagccagatggcttctgggaggccctgggcgggaaggctgcctaccgcacatccccacggctgaaggacaagaagatggatgcccatcctcctcgcctctttgcctgctccaacaagattggacgttttgtgatcgaagaggttcctggtgagctcatgcaggaagacctggcaacggatgacgtcatgcttctggacacctgggaccaggtctttgtctgggttggaaaggattctcaagaagaagaaaagacagaagccttgacttctgctaagcggtacatcgagacggacccagccaatcgggatcggcggacgcccatcaccgtggtgaagcaaggctttgagcctccctcctttgtgggctggttccttggctgggatgatgattactggtctgtggaccccttggacagggccatggctgagctggctgcctgaggaggggcagggcccacccatgtcaccggtcagtgccttttggaactgtccttccctcaaagaggccttagagcgagcagagcagctctgctatgagtgtgtgtgtgtgtgtgtgttgtttcttttttttttttttacagtatccaaaaatagccctgcaaaaattcagagtccttgcaaaattgtctaaaatgtcagtgtttgggaaattaaatccaataaaaacattttgaagtgtgwaaaaaaaaaaaaaaaaaaaaaaaaaaaaaaaaaaaaaaaaaaaaaaaaaaaaaaaaaaaaaaaaaaaaaaaaaaaaaaaaaaaaaaaaaaaaaaaaaaaaaaaaaaaaaaaaaaaaaaaaaaaaaaaaaaaaaaaaaaannn

SEQ ID NO: 224 - DNA, 4395 bp, Homo sapiens
  misc_feature (325): n equals a,t,g, or c
  misc_feature (4382): n equals a,t,g, or c
  misc_feature (4391): n equals a,t,g, or c
ggtaagtcctttattcatagcacagtcctcactaaacataaggagcttcatctggaagaagaagaagaagatgaagcagcagcagctgcagcagcagcagcccaggaagttgaagccaatgtccatgttccacaagtagttctgaggattcagggcttaaacgtagaggctgctgagccagaagtggaggctgccgagccagaagtggaggctgctgagccagaagtggaggctgctgagccaaacggagaggctgaagggccagatggagaggctgcagagcccattggagaggctggacagccaaatggagaggccgagcagncaaatggggatgctgatgagccagatggtgcaggtattgaagacccagaagaaagagctgaagagccagagggcaaaagctgaagagccagagggagatgccgacggagccctgacggtgtgggaattgaagcacccaggaagaaggtgaagtatcaagagattcaggtagaagaaccatactatgactgccatgaatgcacagaaaccttcacttccagcacagcattcagtgaacacctgaaaactcatgccagcatgatcatatttgagcctgcaaatgcctttggggagtgctcaggctacatcgaacgtgccagcaccagcacaggtggtgccaatcaagctgatgagaagtacttcaaatgtgacgtctgtgggcagctcttcaatgaccgcctgtccctcgccagacaccagaatacccacactggctgagggcatggggtaaaggttagaaaaccttcacctaggacttgacccttaccaaaccacagagaatccaaaccaatccatgataatgtcagtaggagacttaaccttagtgtgttacacacctgacttaacatctctaaactcagattgaaaagagaccgaatgtgcagattccacagtcttaagctttccccttcagatgtcagtgtctgcatgtgggaaagccatagcacacatcttacctttccaagtaatcagattgagaaaaccctatgagtattccagactacagagtttgcccaaatcaactgtaaatgacacttgtgtaacgtatatatagtgtttcatgaggtgtatataaaatagcaaattatgacagaacagtgatcacatatatttggatttatatgatatacagttacagtttactctgcagaggtaccttacctggtattctttgaattttttttttttttggaggaggaagagagcaacaaatttgattatatttttaagtgtcttagatcctgagaaagatttattgtgcattatttgaaccctgtcaatatctttttgagtaattgttttgtttcttacccttaaatagtcttgtgaagctgtaggcatgatagataacatggcttttactccttactgtttgaaaagataagtactttagcttctttctgcagccatttcatctgcrccaacactttggaacctaatactgtgtaaggctttacaatatacggattggctttttgtgacccagattgattggttgccacatgttatgtttgttgaagtggttctcatgcaaaaatattacacatttgtgttctgggtttttttttttttttaaccaactcaatatgtgtttgatgatagtgaattgataaaacccgaagcttttccctgtaaatcttacatctttgcctttaaagaatgggttacaaccatcactagatcacagtagtgcctaatgaaggttgagaaccgtaggagaggctctcatgctgtaaataatgttgcaggctaataacctttcatcacttcctttgtgcgcttcctgccttaagtgacaagtagcaacatggcttgggtcccctgtgcagcatcagcttatgctgccacaagtcagtttkcaccctaggtgcccaggagctagtatccttagatctttctatcgctaacttaattctcttcgttatttatctgaccctctaactccatgtctaacttgcattaaaaaaaaaaaaattctttacagtcaacccaagcttaacatggactcaggttccccagcagccttaatttgttttgttaacatctgttccttctttttcagctctcctagagtatttctgagtgttgtgttcatctaatcttagtattcttttaattacaaattgacctcacagcttgaggtttcttgtgtcctattctgtggactacctgtgctcctttgcttcccctcccctcgcataataactatattaagaaattttttttggccttgagttggctggaaaaaaaatataaaatttaaaaaatttaaaaaaaaagatttgcaaaatgtaagtgtagatcatttgaacaagcaaaattaaagtacccactgggggaaatgtgtctgaatcttactcttctggatctgcaggattagggcttggaagtatgtcaaagatgsagggagtgtcaaagtttaggaagattgtagagctgagagcaagaagcagaaatgagtgagtcaaagaagggagtcctaatacatcaccagatctaggaggggagaggagacagacagaagaaaacaccagaggcaagaactgtagaaggccaggtttctgagaatgaattgagcggggtgtcctgagcagtttggaaaaggagtttttgatggtatggtgtaggtgagggctggctgcataggaaggactgaggttggaacggacatcgggaaagctgaggggcagtgaggtttactacatgggaaaaggactcttgaaacgagaatcagtgttgatgtcrgggtgaactttgtgggtacattacttggtgttaacattgttggcagtggtagccccttttcagaaagcaacttgctgtaagtcagggtgtccgttccaaccttcagctagtgaaaaggtagtaacaaatggtaaacaagagaatgattgtttaaacctatctgtggacacttaatgcaactgtttaaaaatgataatcacgagttatgtagcaacgtggaaatatatttacagaacattaagtggagaaagcaggacacgaaagtatatttatactacagttataactcaacagttcatttatatgctgttcatttaacagttcatttaaacagttcattataactgtttaaaaatatatatgcttatagtcaaaagctgttgtggtgttgttgttgtaggcttatagttgagcattattttcttaaatttcttgaatgttctttatggtagtgttactaaaaagtttatgatcacattttcattgtgaacataatttgaactcattatcacacacttggaaaatacagaaaagtggaggaaaaaaaatcatatccccaccatccaaagacatatactctcctcttatcttgttcattcttgtttctgtgcacaggtttatgattataactgtgtcaaaatgtatattcaaaatagctgttacattacctttgtggrattatggttaaatactttcactttaattttttcaaatgttccctataataatgtcctgataacagtgtattatgtgtgtctccattggtgtgcataatacatacccagaggaaaaattagaaaataaagtaaattattttaaaaaattacctatattcccaacacctaacaactactgctaacatcttgatctgtttcctctatcttgtttcagtgcacacgcttgtgataacagtgttaaatatgtgtgcataaagtcttaaatgaaaagatgtggaaaataactaaaatagtgttgtcattgtgggaatttggttaaatattttgtctcaaattccttaaataatctttggtgttttggtaataaattttatgtatgtattttccattacaaatataatacatactcatacaaaactttggaaattcagtaaagaaaattcacacatattcccaacacccaacaacaattaactgttaacatcttgatctgtgcactagtctgtgattattagggtgttagtgataagtatgcataaatgtcaaagatgggaagaaagatgaaaaacaagaaatagttgtgtggttgttgtgggattatggttattttgtttcggtttccttgaaaggtcatcattctagtgttttggtagtccacctttactacatatatttccattatatatgaaatgtgttcattatagaaactttgaagttacagaaatgtagaagagaaactcacccatgttttcaccatccaaagagtgtggttaacatcttgatatattttcttcatcttgtttctgtgcacaggtttttggtttgttaatatggttgtggtcattctatctgtaatagtgtcaacaataaaaataaagttaaaaataaatattaaaaaagaaaaaaaaaaacccnggggggggnccgg

SEQ ID NO: 225 - DNA, 3035 bp, Homo sapiens
  misc_feature (2911): n equals a,t,g, or c
  misc_feature (2959): n equals a,t,g, or c
cccggagcagcgcggcagcagcatggctcacgggcccggcgcgctgatgctcaagtgcgtggtggtcggcgacggggcggtgggcaagacgtgcctactcatgagctatgccaacgacgccttcccggagagtacgtgcccaccgtcttcgaccactacgcaggaagactatgaccgtctgaggcctttatcttacccaatgaccgatgtcttccttatatgcttctcggtggtaaatccagcctcatttcaaaatgtkaaagaggagtgggtaccggaacttaaggaatacgcaccaaatgtaccctttttattaataggaactcagattgatctccgagatgaccccaaaactttagcaagactgaatgatatgaaagaaaaacctatatgtgtggaacaaggacagaaactagcaaaagagataggagcatgctgctatgtggaatgttcagctttaacccagaagggattgaagactgtttttgatgaggctatcatagccattttaactccaaagaaacacactgtaaaaaaaagaataggatcaagatgtataaactgttgtttaattacgtgagaaacatcttcagtggccaaggaaactgtccatttctctcagaaagcaaatgaaatgctacagctatacccagaccttttataggtaatgaagcagttcaaaacttgaaagaaaacaaaacctgtcctcagaattctataaagtgtattaagaatgttccttaaaggtttaagaagcagtaagcagcatctgaagccacaatctattataaatactttatttcaactagaaggtacaatctctcaggggtttcatagtttaaaaagctacaatcacatcatgttgtaactacgtaaaaaacagagctgtaaatggaactgcttggctttgaccatacacatttctgcccagcccttacagaatctgcacaaagaaatatctccctttgctccagttaattgttcttgtatgtaagttgctttctattccagtatatccagagtggtgaaataacaaggccagccacgtagccaaaggtcgctccaagcgtacaggagatgggccatacctgaggagagaatgtatgagatcaaaaaagaacaaatgttttattattacttgagcacaagtgtaacctaaatatttctatattaaagcttaatgtgctttcttaaagaatgccaaaagtgtaataaggtcataactgcatttatcatgaacactaaaaatgtacacattttagttaatgtgcattaaactgtaacaaggcttctggcaattgtagatttagtttgacgctccccaaagtgcatgagacacatgctaaaattacaaattaaaattttgggtcagactttgccataatgatagactcaatttagctctctgaactagttggtaattttttttttttaattcccactttggctgtgtacatcaaatgaaatgagaagtgtgtatgctgaccaaaccacaagaaactttctttaagttgtgttaaagaggaaagacctagaatccaagcgtgttacatgaaaattgtaacagagcagctgcttccacctttcagatatagatgttggaaccacagcagaagttatagagcgacaacttatatacacacctagaatgtaagttaaacaaaataccggcttccagagaccccttttctccagccatattacatcaggctagaagtaattaatgttgatttatttcatctacaagcagttggtccctaagtgaaaggctctgcttgaaaaaaaaaagaaaaaaaagttggaggaaaattttcatgttcttctgtgaagcttatttggtacactggagccatttctaatctttctctggggggaacaggccacagaactgtgttagaggtgaaccatcttaattactagttctattacctaattcagcttccttgtttggtctgctgtggatctgccttattgcatatgccatgcatcagataatggatgcatcagataatggtgttagacaaagcttcattgtgaacaacctaatgcattttagagaaacaatctcatcacattttttctagcctttcctacatttaaacttgctgttgcccaaattataattttttaaatgtctttggtgggcttctgttaattcacatgacttgagcttatagctatgtctactgcacagattgggtaatggaacactaaacttttatacttgaaaatgacagccttaaatgctcatatcagtcacaaatctaggatgtactgtcttgttgtatgtgagctttgtagagatttttaaaaatataagcatcaccttcccattgaagagtggagagagtctactggatgactggccaggaactttctctctgaatcggacatttggatgtcttctttcttccaagaaatggtggttcacattaaagtatcatggccttatgtatgctcaaatggaatcttatgtaactttcttatttaattttggtctgcttatttttagataaaattgaaaggaattgtataaatcaattaacatattagctgagttgtccaacacatggtataaacgaattacaacagtaaactattacacatttccaacttgcctttggggatttatgaggattttttttggtggggggagggggctccaattcatatctctgaaacccttcacacttggtttactaattcaaakttagaagtctagaatttgccctgccctaacagaaacagattaggaatttgtctacacaaactggtgtcacctgtttcttgactgggatttggtttcctcattataaatatgggaggtagaacagagatctccaacgtctctcccatttatcacagtaattttcttattcacagtaatcattgttggrtgttactttttcancttcacattctcaagatggtaaaaatcatgtatatagattatcagaantctaagcaaagatgactgtcacatctgaagctgaggtgccttaggtacatcggccgcgaccacggtaagccgaatt

SEQ ID NO: 226 - DNA, 1511 bp, Homo sapiens
ccggctccgctgcggaaggcggacgactagagtcgttgggcccggcgcgacccgcaggagcgtagagagcgcgggactagagtgcagagctccgggacgtggatcggagccggcgcgatgggcggagagcaggaggaggagcggttcgacggcatgttgctggccatggctcagcagcacgagggcggcgtgcaggagcttgtgaacaccttcttcagcttccttcgacgcaaaacagactttttcattggaggagaagaagggatggcagagaagcttatcacacagactttcagccaccacaatcagctggcacagaagacccggcgggagaagagagcccggcaggaggccgagcggcgggagaaggcggagcgggcggccagactggccaaggaagccaagtcagagacctcagggccccagatcaaggagctaactgatgaagaggcagagaggctgcagctagagattgaccagaaaaaggatgcagagaatcatgaggcccagctcaagaacggcagccttgactccccagggaagcaggatactgaggaagatgaggaggaagatgagaaggacaaaggaaaactgaagcccaacctaggcaacggggcagacctgcccaattaccgctggacccagaccctgtcggagctggacctggcggtccctttctgtgtgaacttccggctgaaagggaaggacatggtggtggacatccagcggcggcacctccgggtggggctcaaggggcagccagcgatcattgatggggagctctacaatgaagtgaaggtggaggagagctcgtggctcattgaggacggcaaggtggtgactgtgcatctggagaagatcaataagatggagtggtggagccgcttggtgtccagtgaccctgagatcaacaccaagaagattaaccctgagaattccaagctgtcagacctggacagtgagactcgcagcatggtggaaaagatgatgtatgaccagcgacagaagtccatggggctgccaacttcagacgaacagaagaaacaggagattctgaagaagttcatggatcaacatccggagatggatttttccaaggctaaattcaactagcccctgttttttcctccctgaactcttggggctgagctgcaaccacccaactttctttcccactcttctctgggacttgtgggcctcagggcttggggcaggcatgggactggcccaggcacacaggtcccggggcatcaggagaaaggctgggtcttgggaccttgtcctccccagttggcctactgttacacattaaaacgatttgcccagctccttctgtgtcctctcttgcctctggcctttctctggggcacaggcctcttacggctgctgctgggaactgggaktttggcttctagcccagattctgccatgtgacctagggcacatccttgcccctctctgggcctcagtttctcattacttaaagattaaaacaagctttgccggtgtta

SEQ ID NO: 227 - DNA, 2239 bp, Homo sapiens
  misc_feature (2238): n equals a,t,g, or c
ggcacgaggggagctgggggctgagtttccctgagtagaggctggcacaggagagaaggcatcacccccacctcgtccaggccagaagatgtccagcttcttgaggctctcctaagtctggctctcctgggaccaagagaaaatcccggtccttgaccaagaagctgctgatgggagctccaccctgggagggggtgccggcaccatgggattgagcgcccgctacggaccccagttcaccctgcagcacgtgcccgactaccgccagawtgtctacatcccaggcagcaatgccacactgaccaacgcagctggcaagcggggatggcaaggccccagcaggtggcaatggcaacaagaagaagtcgggcaagaaggagaagaagtaacatggaggccaggccaagagccacagggcggcctctccccaaccagcccagcttctccttacctgcacccaggcctcagagtttcagggctaacccccagaatactggtaggggccaaggccatgctccccttgggaaacagaaacaagtgcccagtcagcacctaccccttcccccccaggggkttgaatatgcaaaagcagttccgctgggaacccccatccaatcaactgctgtacccatgggggtagtggggttactgtagacaccaagaaccatttgccacaccccgtttagttacagctgaactcctccatcttccaaatcaatcaggcccatccatcccatgcctccctcctccccaccccactccaacagttcctctttcccgagtaaggtggttggggtgttgaagtaccaagtaacctacaagcctcctagttctgaaaagttgsaagggcatcatgacctcttggcctctcctttgattctcaatcttcccccaaagcatggtttggtgccagccccttcacctccttccagagcccaagatcaatgctcaagttttggaggacatgatcaccatccccatggtactgatgcttgctggatttagggagggcattttgctaccaagcctcttcccaacgccctggggaccaktcttctgttttgtttttcattgtttgacgtttccactgcatgccttgacttcccccacctcctcctcaaacaagagactccactgcatgttccaagacagtatggggtggtaagataaggaagggaagtgtgtggatgtggatggtgggggcatggacaaagcttgacacatcaagttatcaaggccttggaggaggctctgtatgtcctcaggggactgacaacatcctccagattccagccataaaccaataactaggctggacccttcccactacataatagggctcagcccaggcagccagctttgggctgagctaacaggaccaatggattaaactggcatttcagtccaaggaagctcgaagcaggtttaggaccaggtccccttgagaggtcagaggggcctctgtgggtgctgggtactccagaggtgccactggtggaagggtcagcggascccagcaggaagggtgggccagccaggccattcttagtccctgggttggggaggcagggagctagggcagggaccaaatgaacagaaagtctcagcccaggatggggcttcttcaacagggcccctgccctcctgaagcctcagtccttcaccttgccaggtgccgtttctcttccgtgaaggccactgcccaggtccccagtgcgccccctagtggccatagcctggttaaagttccccagtgcctccttgtgcatagaccttcttctcccacccccttctgcccctgggtccccggccatccagcggggctgccagagaaccccagacctgcccttacagtagtgtagcgccccctccctctttcggctggtgtagaatagccagtagtgtagtgcggtgtgcttttacgtgatggcgggtgggcagcgggcggcgggctccgcgcagccgtctgtccttgatctgcccgcggcggcccgtgttgtgttttgtgctgtgtccacgcgctaaggcgaccccctcccccgtactgacttctcctataagcgcttctcttcgcatagtcacgtagctcccaccccaccctcttcctgtgtctcacgcaagttttatactctaatatttatatggctttttttcttcgacaaaaaaataataaaacgtttcttctgaaaaaaaaaaaaaaaaaaaaaaaagggggggcccggtccccaatcccccctnt

SEQ ID NO: 228 - DNA, 2346 bp, Homo sapiens
ggcacgagccgaccggcgcggcgctagcctcggggcttgacgggattgtggcggtcctctctcccaattcggaagctacagctacctccggacgctctcaagatggcgacctctctgggttccaacacctacaacaggcagaactgggaggatgcggacttccccattctgtgccagacatgtcttggagaaaacccatatatccgaatgaccaaagaaaagtatgggaaggaatgcaaaatctgtgccaggccattcacagtgtttcgctggtgccctggagtccgcatgcgtttcaagaagactgaagtgtgccaaacctgcagtaaattgaagaatgtctgtcagacctgcctcttagacctagagtatggcctgcccatccaggttcgtgacgcaggattgtcttttaaagatgacatgccaaagtcagatgtcaacaaagagtactatacacagaatatggagagagagatttctaactctgatggaacacggccagttggcatgctggggaaagccacatctaccagtgacatgctgctcaaactggcccggaccacaccctactacaaaaggaatcgaccccacatttgctccttctgggtgaaaggagagtgtaagagaggagaggaatgtccatacagacatgagaagcctacagatccagatgacccccttgctgatcagaatattaaagaccgttattacggaatcaatgatcctgtagctgacaagcttctaaagcgggcttcaacaatgcctcggctggacccaccagaggataaaactatcaccacactatatgttggtggtctaggtgataccattactgagacagatttaagaaatcatttctaccagttcggagagatccggacgatcactgttgtgcagagacagcagtgtgctttcatccagtttgccacacggcaggctgcagaagtggctgctgagaagtcctttaataagttgattgtaaatggccgcagactgaatgtgaaatggggaagatcccaggcagccagaggaaaagaaaaagagaaagatggaactacagactctgggatcaaactagaacctgttccaggattgccaggagctcttcctcctcctcctgcagcagaagaagaagcctctgccaactacttcaacttgcccccaagtggtcctccagctgtggtgaacattgctctgccaccgccccctggcattgctccacccccacccccaggttttgggccacacatgttccacccaatgggaccaccccctcctttcatgcgggctccaggaccaatccactatccttctcaggaccctcagaggatgggagctcatgctggaaaacacagcagcccctagcaccttgtcaccactctggggctctgtggaagaaagggcacttaaaactcccagtaaatcttggaataaatatatttttccttcccttgtagtttccatggtagctgaatgtgctcagatgtgagcagtcagagactgacagccatgctttcctatacttgttcaaaggatcgatggaccgtaaataagctgccattaacacatctggttactgctgtaacatgactaataaaaccgaacgcctgttccccttacccgtgtgggggacacgcagatgagtgaattggaatgtccagcagagttaccctcccaattatatgttcattttgtatattttttggtcgggggaaaaattgacctgcagtaaaaaaacctttgaccatttttatgtccattggatactttcctttttatcatcttaaaaaaagataactagtactaatcattgtagtggcctaagtgtgatttaactcttgaagtcacaccctccgaaagatgagtagaaaccagcaccagcacagcccagatcttctctttcctctccttttcctcatttattcctaaaggaatctgaccattttacgtctctacggcccaaaaaaagacaaaaataaaaattcctttttattcctgtcaactggatggaaacacaaatttcatggagctgtgtaccatcgaagaaacctggtgtctggcatgaaattactgtaaagaacttcctgtaaaacacgttctttaacaaactgaaatgaaaagcattggagcgtctgaatgaaagacgtgacctcctgctgggactctgatggtcttcagcattcaccttcgtgtgtcttcagtgtctcattgtcatccctgcttctgtttggtcttagagtgtttggatataactgaattgtagatggtaaaggaaatttgatgtgttttttgtttttaaataattaaaacgggtcaatttttcaaaaaaaaaaaaaaaaaaaaaaa

SEQ ID NO: 229 - DNA, 2246 bp, Homo sapiens
  misc_feature (2235): n equals a,t,g, or c
ggcacagcggcggtggcggctgcggcaacagcggggccgatgtgtagttggtgactgcctctccagatgctgaggtgcctgtatcattggcacaggccagtgctgaaccgtagtggagtaggctgtgccttctgaagcagtatctattcacaatgaagttgcagtctcccgaattccagtcacttttcacagaaggactgaagagtctgacagaattatttgtcaaagagaatcacgaattaagaatagcaggaggagcagtgagggatttattaaatggagtaaagcctcaggatatagattttgccaccactgctacccctactcaaatgaaggagatgtttcagtcggctgggattcggatgataaacaacagaggagaaaagcacggaacaattactgccaggcttcatgaagaaaattttgagattactacactacggattgatgtcaccactgatggaagacatgctgaggtagaatttacaactgactggcagaaagatgcggaacgcagagatctcactataaattctatgtttttaggttttgatggcactttatttgactactttaatggttatgaagatttaaaaaataagaaagttagatttgttggacatgctaaacagagaatacaagaggattatcttagaattttaagatacttcaggttttatgggagaattgtagacaaacctggtgaccatgatcctgagactttggaagcaattgcagaaaatgcaaaaggcttggctggaatatcaggagaaaggatttgggtggaactgaaaaaaattcttgttggtaaccatgtaaatcatttgattcaccttatctatgatcttgatgtggctccttatataggtttacctgctaatgcaagtttagaagaatttgacaaagtcagtaaaaatgttgatggtttttcaccaaagccagtgactcttttggcctcattattcaaagkacmagatgatgtcmcaaaattggawttgaggttgaagatcgcgaaagaggagaaaaaccttggcttatttatagttaaaaataggaaagatttaattaaagcaacagatagttcagacccattgaaaccctatcaagacttcattatagattctagggaacctgatgcacactcgtgtatgtgaactactgaagtaccaaggagagcactgtctcctaaaggaaatgcagcagtggtccattcctccatttcctgtaagtggccatgacatcagaaaagtgggcatttcttcaggaaaagaaattggggctctattacaacagttgcgagaacagtggaaaaaaagtggttaccaaatggaaaaagatgaacttctgagttacataaagaagacctaaaactgatggctactaaaaagcagagcatttctggtaagactaaattttctcccctccctcttaatgaggttttagagactacaccagaataaaagacagtttaggggacctctgtagaacaacaagggtcttattttgtgaattatatatttcaagaactaaacagagatccacctttctggatctgatttatatcactgaaatgtacagttcttttggaatagtttcacctgagaaaacatagttggctattatcwatcttaacctgttcaggcttttaaaaaaaactgtttttgcatagggtagtactaagatcttaaaaagtggtaactgtcttgaagaaaaaacgtttattgtttgtttgcaattgaaataacagggttaccttaacaatgactgtctatgatgtgtcagttcttatctgaattccaaaataaacctgtgcttaaaaaagaaataattgaccaagtaagtttgcataaaatgtgaatactaaatgtgtccccagttgctggcattcatatgtacaggatttgttctagcaagctatgcttcagtatgtggttgatatttttctgtcacaatgatttctttatgcatgcagagcctgggaaagtcatgggattaacttgagggtcactattgagcctattaattaattaattattgttttaataaaacaaacattggtattggaagataaatatgtttatgtggtatctgacaatgtgtattaggtgtcatatacaatggtaatatgcctgtctttaaagtgttattttattaattaaaaggatatggctattattatatattctctaaagatttattctctaaagaaagatttgagtcctaaatgctttcatncaggtaaataa

SEQ ID NO: 230 - DNA, 2002 bp, Homo sapiens
tctagactagtggatccccgggctgcaggaattcggcacgagatggcggcagcgatgcctgcccggctgttggggtggcggtgacgacaggcagcaaaagaccagctggtcccagattcgctgctggagtgctggatggagcctttctctgccctctgtgacatttccaattttagataatgcctcacatctctgtccccccgggaccccctggagcccccatgatccctaagaagacagcttgaacctagatctcacccccaggatgttgcggaggctgctggagcggccttgcacgctggccctgcttgtgggctcccagctggctgtcatgatgtacctgtcactggggggcttccgaagtctcagtgccctatttggccgagatcagggaccgacatttgactattctcaccctcgtgatgtctacagtaacctcagtcacctgcctggggccccarggggtcctccarctcctcaaggtctgccctactgtccagaacgatctcctctcttagtgggtcctgtgtcggtgtcctttagcccagtgccatcactggcagagattgtggagcggaatccccgggtagaaccagggggccggtaccgccctgcaggttgtgagccccgctcccgaacagccatcattgtgcctcatcgtgcccgggagcaccacctgcgcctgctgctctaccacctgcaccccttcttgcagcgccagcagcttgcttatggcatctatgtcatccaccaggctggaaatggaacatttaacagggcaaaactgttgaacgttggggtgcgagaggccctgcgtgatgaagagtgggactgcctgttcttgcacgatgtggacctcttgccagaaaatgaccacaatctgtatgtgtgtgacccccggggaccccgccatgttgccgttgctatgaacaagtttggatacagcctcccgtacccccagtacttcggaggagtctcagcacttactcctgaccagtacctgaagatgaatggcttccccaatgaatactggggctggggtggtgaggatgacgacattgctaccagggtgcgcctggctgggatgaagatctctcggccccccacatctgtaggacactataagatggtgaagcaccgaggagataagggcaatgaggaaaatccccacagatttgacctcctggtccgtacccagaattcctggacgcaagatgggatgaactcactgacataccagttgctggctcgagagctggggcctctttataccaacatcacagcagacattgggactgaccctcggggtcctcgggctccttctgggccacgttacccacctggttcctcccaagccttccgtcaagagatgctgcaacgccggcccccagccaggcctgggcctctatctactgccaaccacacagccctccgaggttcacactgactcctccttcctgtctaccttaatcatgaaaccgaattcatggggttgtattctccccaccctcagctcctcactgttctcagagggatgtgagggaactgaactctggtgccgtgctagggggtaggggcctctccctcactgctggactggagctgggctcctgtagacctgaggggtccctctctctagggtctcctgtagggcttatgactgtgaatccttgatgtcatgattttatgtgacgattcctaggagtccctgcccctagagtaggagcagggctggaccccaagcccctccctcttccatggagagaagagtgatctggcttctcctcggacctctgtgaatatttattctatttatggttcccgggaagttgtttggtgaaggaagcccctccctgggcattttctgcctatgctggaatagctccctcttctggtcctggctcagggggctgggattttgatatattttctaataaaggactttgtctcgcaaaaaaaaaaaaaaaaaaaaaaaaaaaaaaaaaaaaaaaaaaaaaaaaaa

SEQ ID NO: 231 - DNA, 994 bp, Homo sapiens
  misc_feature (394): n equals a,t,g, or c
  misc_feature (853): n equals a,t,g, or c
tcgacccacgcgtccggttggaggaggtcggctggttatcgggagttggagggctgaggtcgggagggtggtgtgtacagagctctaggactcacgcaccaggccagtcgcgggttttgggccgaggcctgggttacaagcagcaagtgcgcggttggggccactgcgaggccgttttagaaaactgtttaaaacaaagagcaattgatggataaatcaggaatagattctcttgaccatgtgacatctgatgctgtggaacttgcaaatcgaagtgataactcttctgatagcagcttatttaaaactcagtgtatcccttactcacctaaaggggagaaaagaaaccccattcgaaaatttgttcgtacacctgaaagtgttcacgcaagtnattcatcaagtgactcatcttttgaaccaataccattgactataaaagctatttttgaaagattcaagaacaggaaaaagagatataaaaaaaagaaaaagaggaggtaccagccaacaggaagaccacggggaagaccagaaggaaggagaaatcctatatactcactaatagataagaagaaacaatttagaagcagaggatctggcttcccatttttagaatcagagaatgaaaaaaacgcaccttggagaaaaattttaacgtttgagcaagctgttgcaagaggattttttaactatattgaaaaactgaagtatgaacaccacctgaaagaatcattgaagcaaatgaatgttggtgaagatttagaaaatgaagattttgacagtcgtagatacaaatttttggatgatgatggatccatttctcctattgaggagtcaacgtaagtggaantcatatgaaatactttggtaataggttataaattaaatttctatgttaattgcttcatattttgcctttaatatagttatacttaaataatgaacaaagatacagagtatgacaattgggattattacagttgagccaagc

SEQ ID NO: 232 - DNA, 486 bp, Homo sapiens
  misc_feature (49): n equals a,t,g, or c
  misc_feature (440): n equals a,t,g, or c
  misc_feature (485): n equals a,t,g, or c
gactcactatagggcaaagctggtacgcctgccaggtaccgggtccggnaattcccgggtcgacccacgcgtccgggaacagccttctcctgcctcctctgcacctggacaactcaactcctgccaagatgtcctgccagcagaaccagcagcagtgccaacccccacccaagtgtccctcacccaagtgtcccccaaagagcccagtacagtgtctgcctccagcttcctctggctgtgccccaagctctgggggctgtggcctagctccgagggcggctgcttcctgaaccaccacaggcgccaccaccgatgccggcgccagaggyccaactcctgtgacagggcagtggtcagcaaggcgrgggytctggstgckgcayggttctgggggctgctgctgatccagatcctgatgctgagacaagcgatctttggangaaacaagaattcccaagaggccaagaacagccccatctggaagnc

SEQ ID NO: 233 - DNA, 2081 bp, Homo sapiens
gaagcagttcttggcatgcacgatacacagtactgacctacctccagaccatggtattttataacctctttattttcctaaacaatgaagatgcagttaaagatatcaggtggctggttataagtcttttggaggacgaacaactggaggttcgagaaatggctgctactaccttaagcggtctgctacagtgtaactttcttaccatggacagtcctatgcagattcattttgagcaactttgcaaaacaaaactacctaagaaaagaaagcgagaccctggttctgtaggagataccattccttctgcagagttggtcaaacgccatgctggggtgctaggacttggtgcatgtgttctttctagtccttacgatgttcccacctggatgccccagctcctcatgaatctcagtgcacatctaaatgatcctcagcctattgagatgactgtaaaaaaaaccttatccaatttccgaagactcaccatgacaactggcaggaacataaacagcaattcactgatgaccaactgcttgttctcaccgatcttcttgtgtcaccatgctattatgcatagaaagatgactagtcctcacttcaggctcttttcatcaaaaattccacaccctcaggtaccatctgtggtggctctctgcaagttttaaaactgcctctgctgagctctcatcattttggtggtttctgtgttagatctcgttagtctgcattccacagcttctcagttgccatttgatttcccaacttgtccggaagtgtttccagaatactgatcacttttttttttgaggcatctgacaaagtcacaaagtctcagactagaaataattacccagtatgatcatggcatccaagaccagagtctcagaactcattaagaaacagtttacttggaatggagaatacccatctgtaatacaggtcctgtcatttcattcatctcaaattattttgaattcttcccaaatggctgctggatttaggtggtaataggggctgtgggccataaatctgaagccttgagaaccttgggtctggagagccatgaagagggaaggaaaagagggcaagtcctgaacctaaccaatgacctgatggattgctcgaccaagacacagaagtgaagtctgtgtctgtgcacttcccacagactggagtttttggtgctgaatagagccagttgctaaaaaattgggggtttggtgaagaaatctgattgttgtgtgtattcaatgtgtgattttaaaaataaacagcaacaacaataaaaaccctgactggctgtttttyccctgtattctttacaactattttttgaccctctgaaaattattatacttcacctaaatggaagactgctgtgtttgtggaaattttgtaattttttwatttatttwattctctctccctttttattttgcctgcagaatcgttgagagactaataaggcttaatatttaattgatttgtttaatatgttatataaatgtaaaagagtgtataaactgtagagatagcattggcaagacattgtacagatgcaaccttttacacaacatcattgtgtaatttgtaaagattcacrtgtagttctttattatagtgattttgggctttgtacccactgaatgccattttttgtgtttttaaattattttctttatcttgttacaaaaactgagatgtggggtttttttttttcagttcacttatcattagaatgtctgaacttttatgtaacatttttgtgtgcatctctcaatgctaacaccacatgtttgcctatgacaagtttatagagtgaaagggtatcttctgggttgaaataattcacaaattggtgaatgtcatcttgcaacacaccctgtacagtcttccttaaaggaacactacagtatatttttagtatctacatgctgaatgactgaatacagacctaaagacagcagtgstcctggtacagtatttaagtgtcggcatacacaggcgtaatccctgtataaagtagtgccaaactgatttcagttgtgtaactagtttaaaacccaataaatggattc

SEQ ID NO: 234 - DNA, 516 bp, Homo sapiens
  misc_feature (490): n equals a,t,g, or c
  misc_feature (498): n equals a,t,g, or c
cggcacgaggggccagggtgcgggcctgcgcctccctcggctcctggcgcgggcctcggggagaggggtggaagatgtctatggatgtgacattcctggggacgggtgcagcatacccatctccaacccggggtgcctctgctgtggtccttcggtgtgaaggcgagtsctggctctttgactgtggggagggaacacagacacagcttatgaaaagccaacttaaagcagggagaattaccaagatcttcatcacacaccttcatggagaccatttctttggccttcctgggctcctctgcacaatcagcctgcagagtggctccatggtgtccaaacagcctattgaaatctatggccctgtaggcttcgggactttatctggcgaaccatggaactctctcamacgggagctggtcttccattatgtggttcatgaactggttcctacagcagatcaatgtcctgcagaaggaactaaaagaatttncgcatgtnaatagagcagacagtcct

SEQ ID NO: 235 - DNA, 1129 bp, Homo sapiens
  misc_feature (807): n equals a,t,g, or c
cagctcgwcctctgcttccttacagcacccccacctgccagagctgatcctccctaggccctgcctaaccttgagttggcccccaatccctctggctgcagaagtccccttacccccaatgagaggaggggcaggaccagatcttttgagagctgagggttgagggcattgagccaacacacagatttgtcgcctctgtccccgaagacacctgcaccctccatgcggascaagatggggaatggaactgaggaagattataactttgtcttcaaggtggtgctgatcggcgaatcaggtgtggggaagaccaatctactctcccgattcacgcgcaatgagttcagccacgacagccgcaccaccatcggggttgagttctccacccgcactgtgatgttgggcaccgctgctgtcaaggctcagatctgggacacagctggcctggagcggtaccgagccatcacctcggcgtactatcgtggtgcagtgggggccctcctggtgtttgacctaaccaagcaccagacctatgctgtggtggagcgatggctgaaggagctctatgaccatgctgaagccacgatcgtcgtcatgctcgtgggtaacaaaagtgacctcagccaggcccgggaagtgcccactgaggaggcccgaatgttcgctgaaaacaatggactgctcttcctggagacctcagccctggactctaccaatgttgagctagcctttgagactgtcctgaaagaaatctttgcgaaggtgtccaagcagagacagaacagcatccggaccaatgccatcacntctggcagtgcccaggctggacaggagcctggccctggggagaagagggcctgttgcatcagcctctgaccttggccagcaccacctgcccccactggctttttggtgccccttgtccccacttcagccccaggacctttccttgccctttggttccagatatcagactgttccctgttcacagcaccctcagggtcttaaggtcttcatgccctatcacaaatacctcttttatctgtccacccctcacagactaggaccctcaaataaagctgttttatatcaaaaaaaaaaaaaaaaaaaaaaaaaaaaaaaaaaaaaa

SEQ ID NO: 236 - DNA, 1045 bp, Homo sapiens
  misc_feature (973): n equals a,t,g, or c
  misc_feature (1001): n equals a,t,g, or c
  misc_feature (1014): n equals a,t,g, or c
atcctcaaaggcagctcaggctccgtgtggctgcgcaacctgcaactgggcctcttcggcacagcactgggcctggtggggctctggtgggctgagggtaccgccgtggccacccgtggtttcttttttgggtacacacctgctgtctggggcgtggtgctcaaccaggccttcggcgggctactggtggctgtggttgtcaagtacgctgacaatatcctcaagggctttgccacctccctgtccattgtgctgtccactgttgcctccattcgcctctttggcttccacgtggacccattatttgcccttggcgctggactcgtcattggtgctgtctacctctacagccttccccgaggtgcagycaaagccatagcctctgcctctgcctccgcctccgggccctgcgttcaccagcagcctcccgggcagccaccaccaccgcagctgtcttcccaccgtggagacctcatcacggagccctttctgccaaagtcagtgctggtgaagtragggctggcagcaatggggggacacaagggagggggactggggtggagggtgttgggcatctgcaggacccaagtcgccaccctccggggcctggctcctctgggtttgggagatggtcttttctcccaggtcactgagacttctggaggggtgtgggactagagctgggtgtcacgtgaacccttcctggtagggtgacccccttcccctggaggggtgtttagagctgccgcctctgctccctctaacctctttggaggcagggttgggggtattgtcattcaaggccttttttttgtctgctccctccccgaccctgtgccctcttctggaggttctcgtctgggagagtccctccagcagtccctcactcataaggcacactggacaaaactccgagtcttaggaatgacgatgcctactgtggggtagtgccatagttgggcttttctccttncacgttgatatgtatagtcgctttgggnctgccagttcttntacttgaatgcttctggagccaggaaaggca

SEQ ID NO: 237 - DNA, 690 bp, Homo sapiens
  misc_feature (666): n equals a,t,g, or c
  misc_feature (678): n equals a,t,g, or c
ggaggagggtctgccacagctctccgcacctctcctctcccagggcagcctgtgagcagcaagctgtggctctgactctgcaggaggacagagcatccctgacgctttcaggggggccctcggcactggcctttgacctctccaaggtaccaggcccagaggcagcccccaggctgygggcgctgacactgggcctggcaaaacgcgtgtggagcctggagcggcgactggcagctgcagaagagacagctgtcagcccgaggaagagcccccggcctgcagggcctcagctcttcttaccagacccagatccccagagaggtggccctggacctggagtcaggaggcggtgtccaggagagtcgctcatcaaccccgggttcaagagtaagaaaccagctggtggcgtggacttcgatgagacctgaaggtgcagcacaagcgtggccccgcggggagtccgcctatgaggggagaggcagtctttgaggcccccatcagagaccccccgccaccacctccacctgcctgtcctgggccaggactaacacggctcctcaaattccttccctgtcaaataaacagctcccttggttggaaaaaaaaaaaaaaaaaaaaaaagttttttttaattttaaggcgggccaaagttttttttcctttttngttgaagggttnattttttagttt

SEQ ID NO: 238 - DNA, 1873 bp, Homo sapiens
  misc_feature (568): n equals a,t,g, or c
cccgggctcagtatgtggcgccttcctcgcgcgctgtgtgtgcacgctgcaaagaccagcaagctctctggaccttggagcaggcctgccgccttcatgtccactctcctcatcaatcagccccagtatgcgtggctgaaagagctggggctccgcgaggaaaacgagggcgtgtataatggaagctggggaggccggggagaggttattacgacctattgccctgctaacaacgagccaatagcaagagtccgacaggccagtgtggcagactatgaagaaactgtaaagaaagcaagagaagcatggaaaatctgggcagatattcctgctccaaaacgaggagaaatagtaagacagattggcgatgccttgcgggagaagatccaagtactaggaagcttggtgtctttggagatggggaaaatcttagtggaaggtgtgggtgaagttcargagtatgtggatatctgtgactatgctgktggtttatcaaggatgattggaggacctatcttgccttctgaaagatctggccatgcactgattgagcagtggaatcccgtangcctggttggaatcatcacggcattcaatttccctgtggcagtgtatggttggaacacgccatcgccatgatctgtggaaatgtctgcctctggaaaggagctccaaccacttccctcattagtgtggctgtcacaaagataatagccaaggttctggaggacaacaagctgcctggtgcaatttgttccttgacttgtggtggagcagatattggcacagcaatggccaaagatgaacgagtgaacctgctgtccttcactgggagcactcaggtgggaaaacaggtgggcctgatggtgcaggagaggtttgggagaagtctgttggaacttggaggaaacaatgccattattgcctttgaagatgcagacctcagcttagttgttccatcagctctcttcgctgctgtgggaacagctggccagaggtgtaccactgcgaggcgactgtttatacatgaaagcatccatgatgaggttgtaaacagacttaaaaaggcctatgcacagatccgagttgggaacccatgggaccctaatgttctctatgggccactccacaccaagcaggcagtgagcatgtttcttggagcagtggaagaagcaaagaaagaaggtggcacagtggtctatgggggcaaggttatggatcgccctggaaattatgtagaaccgacaattgtgacaggtcttggccacgatgcgtccattgcacacacagagacttttgctccgattctctatgtctttaaattcaagaatgaagaagaggtctttgcatggaataatgaagtaaaacagggactttcaagtagcatctttaccaaagatctgggcagaatctttcgctggcttggacctaaaggatcagactgtggcattgtaaatgtcaacattccaacaagtggggctgagattggaggtgcctttggaggagaaaagcacactggtggtggcagggagtctggcagtgatgcctggaaacagtacatgagaaggtctacttgtactatcaactacagtaaagaccttcctctggcccaaggaatcaagtttcagtaaaggtgttttagatgaacatcccttaatttgaggtgttccagcagctgtttttggagaagacaaagaaaattaaagttttccctgaataaatgcattattatgactgtgacagtgactaatccccctatgaccccaaagccctgattaaatcaagagattccttttttaaaaatcaaaataaaattgttacaacatagccatagttactaaaagatgagttaggtggatttttattatggtca

SEQ ID NO: 239 - DNA, 905 bp, Homo sapiens
  misc_feature (873): n equals a,t,g, or c
  misc_feature (874): n equals a,t,g, or c
  misc_feature (897): n equals a,t,g, or c
  misc_feature (898): n equals a,t,g, or c
tgcggtcccccttctaggtcgacccacgcgtccggtggggccccgggcggcgttgaccatgacccagcagggcgcggcgctgcagaactacaacaacgagctggtcaagtgcatagaggagctgtgccagaagcgggaggagctgtgccggcagatccaggaggaggaggacgagaagcagcggctgcagaatgaggtgaggcagctgacagagaagctggcccgcgtcaacgagaacctggcacgcaagattgcctctcgcaacgagttcgaccggaccatcgcggagacggaggccgcctacctcaagatcctggagagctcccagactttgctcagcgttctcaagagggaagctgggaacctgaccaaggctacagccccagaccagaaaagtagcggcggcagggacagctgaccagaccacgggcagggcctgcctccgtgtgcccctcagctcagccccagcaagtgtgtgctcagagcatctttgttcttcacggcagcagctaccttccctcactgtctcaggtgccgagaggggcaggtgccagcctccactggcatcagtgacaagcccagggcacagcccacccgggggtcctcgcttcatgctcacacaggctatggggatggtgggctccaggtcagctctgcaaggggcttgtctctgtggcacccacactcctgccctgccagggaggctctggttgtctgagcaccatgggggccccctcaccttgtccctcctcagccagcagaggcccagggcaagggacaggaggacaggggttctccttcaccacagaacccaaacctcaggtctcacccctgtggcctgtgattatgaataaagattatctttgtaaagannaaaaaaaaaaaaaaaaaaaaccnnggggggg

SEQ ID NO: 240 - DNA, 1484 bp, Homo sapiens
  misc_feature (1457): n equals a,t,g, or c
  misc_feature (1471): n equals a,t,g, or c
  misc_feature (1480): n equals a,t,g, or c
gtaacaaaactcaggtaacaaccattagcttttgcaagaagtcaggttgactagcaaggagtctgcttctgctacttggagaagagatttagaattatgtatcttttgttacagatatacagatatacaaatatacagatatacaaataagggtgaagatggagggaatctgataaagacatcttataaattcaacagacacaaaagaatttgatctcccataagcaactgtgaaattacaataacagatcctgggaagttctacaattctaattcagttttttcaagggggaacatggcaaaggtgttcagtttcatccttgttaccaccgctctgayaatgggcagggaaatttcggcgctcgaggactgtgcccaggagcagatgcggctcagagcccaggtgcgcctgcttgagacccgggtcaaacagcaacaggtcaagatcaagcagcttttgcaggagaatgaagtccagttccttgataaaggagatgagaatactgtcgttgatcttggaagcaagaggcagtatgcagattgttcagagattttcaatgatgggtataagctcagtggattttacaaaatcaaacctctccagagcccagcagaattttctgtttattgtgacatgtccgatggaggaggatggactgtaattcagagacgatctgatggcagtgaaaactttaacagaggatggaaagactatgaaaatggctttggaaattttgtccaaaaacatggtgaatattggctgggcaataaaaatcttcacttcttgaccactcaagaagactacactttaaaaatcgaccttgcagattttgaaaaaaatagccgttatgcacaatataagaatttcaaagttggagatgaaaagaatttctacgagttgaatattggggaatattctggaacagctggagattcccttgcggggaattttcatcctgaggtgcagtggtgggctagtcaccaaagaatgaaattcagcacgtgggacagagatcatgacaactatgaagggaactgcgcagaagaagatcagtctggctggtggtttaacaggtgtcactctgcaaacctgaatggtgtatactacagcggcccctacacggctaaaacagacaatgggattgtctggtacacctggcatgggtggtggtattctctgaaatctgtggttatgaaaattaggccaaatgattttattccaaatgtaatttaattgctgctgttgggctttcgtttctgcaattcagctttgtttaaagtgatttgaaaaatactcattctgaacatatccatgcgcaatcatgataactgttgtgagtagtgcttttcattcttctcacttgcctttgttacttaatgtgctttcagtacagcagatatgcaatattcaccaaataaatgtagactgtgttaawaaaaaaacaacaaatatgaanaaaaaaaaaaaaanggggggctntttt

SEQ ID NO: 241 - DNA, 1521 bp, Homo sapiens
caaaagccttaatgggcctgcagactttgaaaagcgagtggagggcggtgggcggccgcgtgcgcccctggtcaatgccctcctgacagcacccgagttccttatttacactggctgcatggtttgtgtgtttctgttttgtttctctccccctgcagggctgtttkcggggtggggtggggggttcgctatgtcggatgacgattcgagggccagcaccagctcctcctcatcttcgtcttccaaccagcaaaccgagaaagaaacaaacacccccaagaagaaggagagtaaagtcagcatgagcaaaaactccaaactcctctccaccagcgccaagagaattcagaaggagctggcggacatcactttagaccctccacctaattgcagtgctggtcccaaaggcgataacatctatgaatggagatcaaccattctagggcctccaggatccgtgtatgagggtggtgtattctttctcgatatcacttttacaccagaatatcccttcaagcctccaaaggttacatttcggacaagaatctatcattgtaatattaacagtcaaggtgttatttgcttggacatattgaaagataattggagtccagcactaaccatttctaaagtcctcctttctatctgctcacttcttacagactgtaatcctgccgaccccttggtgggaagtattgccactcagtatatgaccaacagagcagaacatgacagaatggccagacagtggaccaagagatacgctacataaattggggtttcacaattcttacattatttgtctgtcacagaagagagctgcttatgattttgaaggggtcagggagggtgggagttggtaaagagtagggtatttctataacagatattattcagtcttatttcctaagattttgttgtaacttaaggtatcttgctacagtagacagaattggtaatagcaacttttaaaattgtcattagttctgcaatattagctgaaatgtagtacagaaaagaatgtacatttagacatttgggttcagttgcttgtagtctgtaaatttaaaacagcttaatttggtacaggttacacatatggccatttatgtaaagtccctctaagactacatactttttgtttaaaacaaaattggaatttgttttcccttcttggaagggaacattgatatttaacagagtttttagagattgtcatctcatatatataaaatggacacgtggctataaaacaccatataagagatgagtagtgcgttttattttatatgccaatctactttgtttaaaaaaggtctgaatcaggacttgtgaaaacctgtagtgaaataccttaagctgttaactaactgtaaggcgtggaataggagttgctcagtggattggttctatgttgtggactacttaagtctgcatttgttactgtgctaataaacaatattaaaaaccacctaataaacactgctgtgttcatttacttttcttttgccttttggttgc

SEQ ID NO: 242 - DNA, 1144 bp, Homo sapiens
  misc_feature (1093): n equals a,t,g, or c
  misc_feature (1105): n equals a,t,g, or c
  misc_feature (1106): n equals a,t,g, or c
  misc_feature (1139): n equals a,t,g, or c
gcaaactgctacgaagaaatacagataaaaaaggcaagcctgaaatagcatgtgaaaacccacattgtacagtagtacctttgaagcagcctactctacacattgcagacaaagatccaatcccagaggagcaggaattagaagcttatgtagatgatatagatattgatagtgatttcagaaaggatgatttttattacttgtctcaagaagacaaagagagacagaagcgtgagcatgaagaatccaagagggtgctccaagaattaaaatctgtgctgggatttaaagcttcagaggcagaaaggcagaagtggaagcaacttctatttagtgatcatgtgtttcttcatatagctttaaaattatgctattgacattatgggaaagatttatcaatgagagaaatgtgtctctttttcagccgtgttgaaatccttgtctcctgtagacccagtggaacccataagtaattcagaaccatcaatgaattcagatatgggaaaagtcagtaaaaatgatactgaagaggaaagtaataaatccgccacaacagacaatgaaataagtaggactgagtatttatgtgaaaactctctagaaggtaaaaataaagataattcttcaaatgaagtcttcccccaaggagcagaagaaagaatgtgttaccaatgtgagagtgaagatgaaccacaagcagatggaagtggtctgaccactgcccctccaactcccagggactcattacagccctccattaagcagaggctggcacggctacagctgtcaccagattttaccttcactgctggccttgctgcagaagtggctgctagatctctctcctttaccaccatgcaggaacagacttttggtgatgaggaggaagaacaaataatagaagaaaataaaaatgagatagaagaaaagtaagaaccaagattcatatgaagtgatattagattgttccttttacaaaagtgtttagcttcaagactggaaagggaatatgagtgtaagtttactatatataaagctaagatgtggatttacaggaagaaccctggtttgaataactgatskgaaattaggnaaaacttgtccnnggcatttcccgttgaaagttcccccttaaaganccccg

SEQ ID NO: 243 - DNA, 934 bp, Homo sapiens
aacacaggaaaagtcgtcctgccaatcactgtgtttatttctatggagatgagatttcattttcatgtcatgagaccagtaggttttcagctatatgccaaggagatggcacgtggagtccccgaacaccatcatgtggagacatttgcaattttcctcctaaaattgcccatgggcattataaacaatctagttcatacagctttttcaaagaagagattatatatgaatgtgataaaggctacattctggtcggacaggcgaaactctcctgcagttattcacactggtcagctccagcccctcaatgtaaagctctgtgtcggaaaccagaattagtgaatggaaggttgtctgtggataaggatcagtatgttgagcctgaaaatgtcaccatccaatgtgattctggctatggtgtggttggtccccaaagtatcacttgctctgggaacagaacctggtacccagaggtgcccaagtgtgagtgggagacccccgaaggctgtgaacaagtgctcacaggcaaaagactcatgcagtgtctcccaaacccagaggatgtgaaaatggccctggaggtatataagctgtctctggaaattgaacaactggaactacagagagacagcgcaagacaatccactttggataaagaactataatttttctcaaaagaaggaggaaaaggtgtcttgctggcttgcctcttgcaattcaatacagatcagtttagcaaatctactgtcaatttggcagtgatattcatcataataaatatctagaaatgataatttgctaaagtttagtgctttgagattgtgaaattattaatcatcctctgtgtggctcatgtttttgcttttcaacacacaaagcacaaattttttttcgattaaaaatgtatgtataaaaaaaaaaaaaaaaaactcga

SEQ ID NO: 244 - DNA, 915 bp, Homo sapiens
  misc_feature (210): n equals a,t,g, or c
  misc_feature (243): n equals a,t,g, or c
  misc_feature (244): n equals a,t,g, or c
gcgaccgccggggcgctgcagaacatcacggcaggcgaccgagtgggcgggggtgctgagccgcctgccctggagcaggagcgtattctgaaccccctgctagaccgtgtcaggaccgccgaccaccaccagctgcgctcactgactggcctcatccgaaacctgtctcggaacgctaggaacaaggacgagatgtccacgaaggtggtngagccacctgatcgagaagctgccrggcasgtnngggtgagaagtygcccccagccgaggtgctggtcaacatcatagctgtgctcaacaacctggtggtggccagccccatcgctgcccgagacctgctgtattttgacggactccgaaagctcatcttcatcaagaagaagcgggacagccccgacagtgagaagtcctcccgggcagcatccagcctcctggccaacctgtggcagtacaacaagctccaccgtgacttycgggcgaaggctatcggaaggaggacttcctgggcccataggtgaagccttctggaggagaaggtgacgtggcccagcgtccaagggacagactcagctccaggctgcttggcagcccagcctggaggagaaggctaatgacggaggggcccctcgctggggcccctgtgtgcatctttgagggtcctgggccaccaggaggggcagggtcttatagctggggacttggcttccgcagggcagggggtggggcagggctcaaggctgctctggtgtatggggtggtgacccagtcacattggcagaggtgggggttggctgtggcctggcagtatcttgggatagccagcactgggaataaagatggccatgaacagtcaaaaaaaaaaaaaaaaaaaaaaaaaaaaaaaaaaaaaaaaaaaaaaaaaaaaaaaaaaaaaac

SEQ ID NO: 245 - DNA, 1276 bp, Homo sapiens
gaattcggcagagccccaaggaagaccagcctgcctctggtcggttcctggcgctctgcgtttcgtgaccttgtccagtagaaggctatttaattttcacaactgcttgaattttgacatacaagatgaagcaagatgcctcaagaaatgctgcctacactgtggattgtgaagattatgtgcatgtggtagaatttaatccctttgagaatggggattcaggaaacctaattgcatatggtggcaataattatgtggtcattggcacgtgtacgtttcaggaagaagaagcagacgttgaaggcattcagtataaaacacttcgaacatttcaccatggagtcagggttgatggcatagcttggagcccagagactagacttgattcattgcctccagtaatcaaattttgtacttcagctgctgatatgaaaattagattatttacttcagatcttcaggataaaaatgaatataaggttttagagggccataccgatttcattaatggtttggtgtttgatcccaaagaaggccaagaaattgcaagtgtgagtgacgatcacacctgcaggatttggaacttggaaggagtgcaaacagctcattttgttcttcattctcctggcatgagtgtgtgctggcatcctgaggagacttttaagctaatggttgcagagaagaatggaacaatccggttttatgatcttttggcccaacaggctattttatctcttgaatcagaacaagtgccattaatgtcagcacactggtgcttaaaaaacaccttcaaagttggagccgttgcaggaaatgattggttaatttgggatattactcggtccagttatcctcaaaataagagacctgttcacatggatcgagcctgcttattcaggtggtccacaattagtgaaaatctgtttgcaaccactggttatcctggcaaaatgcaagccagtttcaaattcatcatttaggacaccctcagcccatcctcatgggttctgtagccgttggatctggactgtcctggcatcgaactctccctctgtgtgtaattggaggagaccacaagctgttgttttgggtgactgaagtataaagtgttttctgtaccttagattcacaaactttgtatttttagtacatattttgaagaatttctatagtacatattttgaagaatttttatatcaaatataccgtatactttagaaaatgtctcagttgcttttattaaataaaatgttgatggtttgaaaaattaaaaaaa

SEQ ID NO: 246 - DNA, 3366 bp, Homo sapiens
cccacgcgtccgaactggacagggatgaccaacctgctggatatcccaggacttagctcactctctgacaccatgatcatggactccattgctgccttcctcgtgttgcccaaccgattactggtgccccttgtgcctgaccttcaagatgtggctcagttgcgttcccctctgcccaggggcattattcgaattcacctgctggctgctcgagggctgagttccaaggacaaatatgtgaagggcctgattgagggcaagtcagacccatatgcacttgtgcgtttgggtacccagacattctgcagtcgtgtcattgatgaagaactcaacccacagtggggagagacttatgaggtgatggtacacgaggtcccagggcaggagattgaagtggaggtgttcgacaaggatccagataaagatgactttctgggcagaatgaagctggatgtagggaaggtgttacaggctagcgttctggatgattggttccctctacaaggtgggcaaggccaagttcacttgaggctagaatggctgtcacttttgtcagatgcagagaaactggagcaggttctacagtggaattggggagtctcctctcgaccagatcccccgtcagctgccatcttagttgtctacctggatcgggcccaggatcttcctctgaagaaggggaacaaggaacccaaccctatggtacaactgtcaattcaggatgtgactcaggagagcaaggctgtctacagtaccaactgcccagtgtgggaggaagcgttccggttcttcctacaagaccctcaaagccaggagctcgatgtgcaagtgaaggatgattccagggccctgactttaggagcactgacgctgcctctggcccgcctgctgactgccccagaactcatcctggaccagtggttccagctcagcagctctggtccaaactccagactctatatgaaactagtcatgaggatcctgtacttggattcatcagaaatatgcttccccacggtgcctggttgtcctggtgcttgggacgtggacagtgagaatccccagagaggcagcagtgtggatgccccacctcgaccctgtcacacgactcctgatagccagtttgggactgagcatgtgcttcggatccatgtattagaggcccaggacctgattgccaaagaccgtttcttggggggactggtgaagggcaagtcagacccctatgtcaaactaaagttggcaggacgaagcttccggagccatgttgttcgggaagatctcaatccccgctggaatgaggtttttgaggtgatcgtcacatcagttccaggccaagagctagaggttgaagtctttgacaaggacttggacaaggatgattttctgggcaggtgtaaagtgcgtctcaccacagtcttaaacagtggcttccttgatgagtggctgaccctggaggatgtcccatctggccgcctgcacttgcgcctggagcgtctcaccccccgtcccactgctgctgagttagaggaggtgctgcaggtgaatagtttgatccagactcagaagagtgcggagctggctgcggccctgctatccatctatatggagcgggcagaggacctcccgctgcgaaaaggcaccaagcacctcagcccttatgctactctcactgtgggagatagttctcataaaaccaagactatttcgcaaacttcagcccctgtctgggatgagagtgcctcctttctcatcaggaaaccacacactgagagcctagagttgcaggttcggggtgagggcactggcgtgctgggctcattatccctgcccctctcagagctcctcgtggctgaccagctctgcttggaccgctggtttacactcagcagtggtcaggggcaggtgctactgagagcacagctagggatcctggtgtcccagcactcgggagtggaagctcatagccacagctacagccacagctcctcatcgctgagtgaagaaccagagctctcggggggaccccytcacatcacctcctcagccccagagctccggcagcgcctaacacatgttgacagtccccttgaggctccagcsgggcctctgggccaggtgaaactgactctgtggtactacagtgaagaacgaaagctggtcagcattgttcatggttgccggtcccttcgacagaatggacgtgatcctcctgatccctatgtgtcactgttgctactgccagacaagaaccgaggcaccaagaggaggacctcacagaagaagaggaccctgagtcctgaatttaatgaacggtttgagtgggaactccccctggatgaggcccagagacgaaagctggatgtctctgtcaagtctaattcctccttcatgtcaagagagcgtgagctgctggggaaggtgcagctggacctagctgagacagacctttcccagggtgtagcccggtggtatgacctgatggacaacaaggacaagggcagctcctaggagctggcgagtcccagcctgactgctctgtcttcctgccttcgtctcgctccatcaccgcctcaatgtgatgagcctaaagctagggtccaagggcagagcctgtgcccttcagccctttcacctaacaggcccatattcgggcctttgcctgaccaaagagaagaaccgtatgttccctttactgcacggcctttatccttctgggcccctggggcggggacctgagctggctgtttcctgctttgcctgcacattgttctcccttcctcccaactcctcagggccttctgtatctgtgcctggccagtggcagcactagcagtggtattagcttatgccaaatacagctttggaaggatctttttttctttaactagatggtcaccttcttccctaccacacatgggtgggaaggtggacaggctaacctctccagctgtgagcctcttagactactgcatgtagcaaatgttcagcagctcaggcccccatgtccagttctgtccccactgtcctcaaccctgtcctgaaaattctactgctttgatggctggggccagtctcttgtcactttggaaactgaggacgcgtggattctactcaagcctccaagtagtggcatatcagtcttggagctcctagctggtgatacggagagggctttggaggacttgggacagcagggccaatttttttgcccaagtgcctaggctgctaactcactgactagaacttaatctggtactttacagttttgcaccaactctgccaagccactggatcttacattaaacatcatactcaaaaaaaaaaaaaaaaaaaaattcgggggggggcccgttacccatttgg

SEQ ID NO: 247 - DNA, 2148 bp, Homo sapiens
  misc_feature (1259): n equals a,t,g, or c
gcggccgccaagcgatccctgctccgcgcgacactgcgtgcccgcgcacgcagagaggcggtgacgcactttacggcggcagcgtaagtgcgtgacgctcgtcagtggcttcagttcacacgtggcgccagcggaggcaggttgmtgtgtttgtgcttccttctacagccaatatgaaaaggcctaagttaaagaaagcaagtaaacgcatgacctgccataagcggtataaaatccaaaaaaaggttcgagaacatcatcgaaaattaagaaaggaggctaaaaagcrgggtcacaagaagcctaggaaagacccaggagttccaaacagtgctccctttaaggaggctcttcttagggaagctgagctaaggaaacagaggcttgaagaactaaaacagcagcagaaacttgacaggcagaaggaactagaaaagaaaagaaaacttgaaactaatcctgatattaagccatcaaatgtggaacctatggaaaaggagtttgggctttgcaaaactgagaacaaagccaagtcgggcaaacagaattcaaagaagctgtactgccaagaacttaaaaaggtgattgaagcctccgatgttgtcctagaggtgttggatgccagagatcctcttggttgcagatgtcctcaggtagaagaggccattgtccagagtggacagaaaaagctggtacttatattaaataaatcagatctggtaccaaaggagaatttggagagctggctaaattatttgaagaaagaattgccaacagtggtgttcagagcctcaacaaaaccaaaggataaagggaagataaccaagcgtgtgaaggcaaagaagaatgctgctccattcagaagtgaagtctgctttgggaaagagggcctttggaaacttcttggaggttttcaggaaacttgcagcaaagccattcgggttggagtaattggtttcccaaatgtggggaaaagcagcattatcaatagcttaaaacaagaacagatgtgtaatgttggtgtatccatggggcttacaaggagcatgcaagttgtccccttggacaaacagatcacaatcatagatagtccgagcttcatcgtatctccacttaattcctcctctgcgcttgctctgcgaagtccagcaagtattgaagtagtaaaaccgatggaggctgccagtgccatcctttcccaggctgatgctcgacaggtagtactgaaatatactgtcccaggctacaggaattctctnggaattttttactrtgcttgctcagagaagaggtatgcaccaaaaaggtggratcccaaatgttgaaggtgctgccaaactgctgtggtctgagtggacagggtaagctttcttttctgttggcattttggtgaccactagaataaaccttcttttgacacatcttatttttaatatcagtgcctcattagcttactattgccatccccctacatcttggrctcctcctccatattttaatgagagtattgtggtagacatgaaaagcggcttcaatctggaagaactggaaaagaacaatgcacagagcataagagccatcaagggccctcatttggccaatagcatccttttccagtcttccggtctgacaaatggaataatagaagaaaaggacatacatgaagaattgccaaaacggaaagaaaggaagcaggaggagagggaggatgacaaagacagtgaccaggaaactgttgatgaagaagttgatgaaaacagctcaggcatgtttgctgcagaagagacaggggaggcactgtctgaggagactacagcaggtgaacagtctacaaggtcttttatcttggataaaatcattgaagaggatgatgcttatgacttcagtacagattatgtgtaacagaacaatggctttttatgattttttttttaacattttaagcagactgctaaactgttctctgtataagttatggtatgcatgagctgtgtaaattttgtgaatatgtattatattaaaaccaggcaacttggaatccctaaattctgtaaaaagacaattcatctcattgtgagtggaagtagttatctggaataaaaaaagaagatacctattaaaaaaaaaaaaaaaaaaaaaaaaaaaaaa

SEQ ID NO: 248 - DNA, 2225 bp, Homo sapiens
  misc_feature (14): n equals a,t,g, or c
ccaaagaattgggncacagcacgtgctgaccaccatgcctcgatgaactgggtcccctgcggccactcttattttggwgccacacttaatagcttcatccacgtcctcatgtactcttactatggtttgtcgtcagtcccttccatgcgtccatacctctggtggkaagaagtacatcactcaggggcagctgcttcagtttgtgctgacaatcatccagaccagctgcggggtcatctggccgtgcacattccctcttggttggttgtatttccagattggatacatgatttccctgattgctctcttcacaaacttctacattcagacctacaacaagaaaggggcctcccgaaggaaagaccacctgaaggaccaccagaatgggtccatggctgctgtgaatggacacaccaacagcttttcacccctggaaaacaatgtgaagccaaggaagctgcggaaggattgaagtcaaagaattgaaaccctccaaaccacgtcatctgattgtaagcacaatatgagttgtgccccaatgctcgttaacagctgctgtaactagtctggcctacaatagtgtgattcatgtaggacttctttcatcaattcaaaacccctagaaaacgtatacagattatataagtagggataagatttctaacatttctgggctctctgacccctgcgctagactgtggaaagggagtattattatagtatacaacactgctgttgccttattagttataacatgataggtgctgaattgtgattcacaatttaaaaacactgtaatccaaacttttttttttaactgtagatcatgcatgtgattgtaaatgtaaatttgtacaatgttgttatggtagagaaacacacatgccttaaaatttaaaaagcagggcccaaagcttattagtttaaattagggtatgtttcaagtttgtattaatttgtaatagctctgtttagaaaaaatcaaagaccatgatttatgaaactaatgtgacataatttccagtgacttgttgatgtgaaatcagacacggcaccttcagttttgtactattggctttgaatcaagcaggctcaaatctagtggaacagtcagtttaactttttaacagatcttatttttttattttgagtgccactattaatgtaaaaaggggggggctctacagcagtcgtgatgaaacttaaatatatattctttgtcctcgagattttaggaagggtgtagggtgagtaggccatttttaatttctgaagtgctaagtgtttttatacagcaaacaaaaagtcaattttgctttccaccagtgcgagagaggatgtatacttttcaagagagatgattgcctatttaccgtttgacagagtcccgtagatgagcaatggggaactggttgccagggtctaaatttggattgatttatgcactgttatctgttttgacacagatttccttgtaaaatgtgcctagtttaccaaaattaacaaagggggggaaaggaccttagaactttttaaggtaaaatcaaatatagctacagcataagagaatcgagaaatttgatagaggtaacttgtttaatgtaaatctaatagtacttgtaatttctttctgcttagaatctaaagatgtgtttagaacctcttgtttaaaaataatagactgcttatcataaaatcacatctcacacatttgaggcagtggtcaaacaggtaaagcctatgatgtgtgtcattttaaagtgtcggaatttagcctctgaataccttctccattgggggaaagatattcttggaaccactcatgacatatcttagaaggtcattgacaatgtataaactaattgttggtttgatatttatgtaaatatcagtttaccatgctttaattttgcacattcgtactatagggagcctattggttctctattagtcttgtgggttttctgtttgaaaaggagtcatggcatctgtttacatttaccttatcaaacctagaatgtgtatatttataaatgtatgtcttcattgctaggtactaatttgcagatgtctttacatatttcaatacagaaactataacattcaatagtgtgctgtcaaagtgtgcttagctcacctggatatacctacattgttaaatgtctaaacagtaatcattaaaacatttttgattaaaaaaaaaaaaaaaaaaaaaaaaaaaaaaa

SEQ ID NO: 249 - DNA, 1204 bp, Homo sapiens
  misc_feature (1197): n equals a,t,g, or c
tcgccgctggctccgtctgttggggggcgaacacgccgcggtcctcgtcgtggtgagcgcascactcaggctggtcctgggggtggggctgtaggggaaagtgctaaagccgctgagtgaagtaagaactctgctagagaggaaatggctgcttcatcatcatcctcctcagctggtggggtcagtggaagttctgtcactggatctggtttcagtgtctcagaccttgccccaccacggaaagcccttttcacctaccccaaaggagctggagagatgttagaagatggctctgagagattcctctgcgaatctgtttttagctatcaagtggcatccacgcttaaacaggtgaaacatgatcagcaagttgctcggatggaaaaactagctggtttggtagaagagctggaggctgacgagtggcggtttaagcccatcgagcagctgctgggattcaccccctcttcaggttgatactgcctggatggtcacctctggtgcgcagcaagtgcaaagccagtgggggactttctcacagcttacatagccatccagagatccacagctacgtcactgaattgttaatgcacatttgtacttggtttctctgtatctattcacaggcaacaaatacttatatgtgtgatctttcagggaatgttttgtttatttgtttttaaaagtattgggaatcagattaagacaatcagtttcagagaaccaggaggtttggggttaagagatactcaaaaattttcacaagccaagtagggcatatatcagatttggccaactgaatggcgtctgtcctgtcatccatatggtgcctggaaatatttaccagtcaaggtcaaggtcagcatctgtggttaaaaatatagcattctgacctaaaaaagttattttgcagatgaatgtgttttcaactcaggacctatccaaatgaggaatttttaaatattcttttttttttcctatttttagacatcaattctatagattctgactttttctaacctcttatagacatgccaaatgctggcaaaaagaagtgctttttggatatggcagcacttgtaaaaataaagcagtaagcaaaatccttttaaacacagaaatcctgagttcttctcattggtggactcaagcaattctgtagcaaataaatcctttgaaagagctccaaaaaaaaanaaaaaaa

SEQ ID NO: 250 - DNA, 1314 bp, Homo sapiens
gcgctcctttcctggcagcaggggtttcaatgggaggaatgctgcttctaaattacttgggcaaaattgggtccaaaacgcctttgatggcagctgcaactttttccgttggttggaacaccttcgcttgctcagagtcattggaaaaaccactgaactggctactttttaattactatttgacaacctgccttcagtcttcagttaataagcaccgacatatgtttgtaaaacaagttgatatggatcatgtcatgaaggctaaatccatcagagagtttgataagcgattcacttcagtcatgtttggataccaaacaattgatgattattatactgatgccagtccgagtcctagactgaagtcagtaggaattccagtattgtgtctaaattctgtggatgatgttttctcacccagtcatgctattccaatagaaactgctaagcaaaatcctaatgttgctttggtccttacttcttatggaggccatattggttttctggagggaatctggccaagacagtccacttacatggatcgtgtcttcaagcaatttgtgcaagccatggttgagcatggacatgaactctcttaacatgtagttctttgggtgcattttgtctgaaccacaattgtgaaggcagctcagcttagtgcacaaattttaactgttgtatataaagcaaataagccagcagatgggtgaagaggtccagaatgatatgcaaaaactactttttagagaaacaaaacaactttgtagcaacaaattaaatatagtattagattgttacttacgtagattttatttttactatgccttaccaagtacatccttaaacaaagtagtatgtacatgaaattgcacttaaccaaaactattgtgtaaaacaaattttaattcctcagggttttaatttaaactagtatttttttagattatttgttttaggtgatttaatggtactttaataactactaagaaatattggctatttcaatgtaagttataaggtggtacattcctaagggtatttatagttgatgataacatgaaaactgaaataagataaaatacaacgtgctaaatcttttatgtattctaactttaaaagacaagtgcaacaaagttagactgacttctatatgtgctcttttactctgataatattaaattaggactaacttatgttttataatgattataatttacatgcttatttttaaaatagtatatgtggacacatatatatcattatattaaaataaattctaccattttaaattggaaaaaaaaaaaaaaaaaaaaa

SEQ ID NO: 251 - DNA, 1159 bp, Homo sapiens
  misc_feature (1132): n equals a,t,g, or c
cctgcctcagcctcctcagtagctgggactacaagtgcctgccaccacgcctgggttattttttatatttttagtagagacggggtttcactgtgttagccaggatggtctcgatctccaggatggtctcgatctccaggatggtctcgatctcctgacgtcgtgatccacccgcctcggcctcccaaaatgctgggattacaggtgtgagccactgtgcccggccaaaagaacagaaattattttatcctgaagtaagctgtttatatttgggattatactgaacctatttgtccaataacctgagttttcaaataattttagttctataagtactataattatataaatattaatgaattcagattagctgaaaggaaaaaaagtagaagcctgactacttggtgctaactactaaagattttggcagaatcaatgttggatttggctttcctgtcccttccccatgccagccccccagagtgttctgccttgtgctgcctcccttcacckggagtgccacacccctctctctgccagttcagctcttcattcttcaaggcctgaccttgtctgacccttgtgcctctaaacccgtgggccccacctctcttggttcctatgtcaggtgatgtttgtgtttttggttatgcccatctccatagccagaccaagcactctggaagccagggttgggtgcttatttatctgtttgccatgcagaaaatatcttgcacaaaattacctctgttaaggaatctgaagctgaatttagtttggctgagtcagggttgggttttttttaaggggctgtggggtgaaatgttgactggaagccacccacaaacacacacctgctggttaggaacccggctgtgggtggttctgagctgtttggcttcattgacagtttctgattgccctgagcaccaggtctcatcttgcatctcatcctggcctggagaacattcagtttccttccaacccttcccacctttcccccactcccttggaggaactgaagttggggttgaggagagccagatggctggagtgggtatttgaaggkctttctgtcacctgttcagtgtggtctgccccacccctgctgacmaagactgactgaaatgtnaaataatacagaccatctcaactcaga

SEQ ID NO: 252 - DNA, 2488 bp, Homo sapiens
  misc_feature (7): n equals a,t,g, or c
  misc_feature (64): n equals a,t,g, or c
  misc_feature (2334): n equals a,t,g, or c
tgtatgnccagctggtactcctgcaggtaccggtccggattcccgggtcgacccacgcgtccgnggacgcgtgggttgctcggcagcttgcaaagcctgacaacaccttgtttgtaaacagaacactttttgatcaggtccttgaattcctttgtagtcctgacgatgactcccgacactctgaaagacagcaggtccttttagaattgctgcaggctggaggcatagttcaatttgaagagagtcgactcatccggatggcagaaaaagctgagttctatcaaatttgtgaatttatgtatgaaagagaacaccaatatgacaaaattattgattgcyacttacgtgaccctctgcgagaggaagaagtctttaattacattcacaatatcttayccattcccggacacagtgcagaggagaagcagtctgtatggcagaaagcaatggatcatattgaggaacycgkgkccctgaagccttgtaaagctgcggagctggttgccacccacttttctggacatattgaaacggtcattaaaaaacttcagaaccaggttttgcttttcaaatttttgaggagtcttcttgacccaagggaaggtattcatgtaaatcaagaattactgcaaatatctccttgtatcacagagcagttcattgagctgttgtgtcagttcaacccaacccaagttatagagactctgcaagtccttgagtgctaccgtctggaagaaactattcagattactcagaagtatcaacttcatgaagtcaccgcttatctattggaaaagaaaggagatattcatggtgccttcctaataatgttagagagactacaaagcaaacttcaagaggtaacacatcaaggtgaaaataccaaagaggatccctcattgaaggatgttgaagatactatggtggagaccattgctctttgccagagaaattcacataatttgaaccagcagcaacgtgaggccctttggtttccgttattggaggcaatgatggcccctcagaagctgtccagttcagccattcctcatctacactctgaagctctgaagtctttgaccatgcaagttttaaatagcatggcagcatttattgcccttccatcaatcttgcaaagaatcttacaggatccagtttatggaaaaggaaaacttggagaaatccagggacttatcttgggaatgttagatacctttaactatgaacaaaccctgctggaaacaacaaccagccttytaaaccaagatctccattggtcattgtgtaacctgagagcttcggtcaccagaggactgaatcccaaacaagattactgctctatatgtttgcagcagtacaagagacgccaagaaatggctgatgaaataattgtctttagctgtggccatttgtatcactcattctgcctacaaaacaaagaatgcactgtggaatttgagggccaaacaagatggacatgctacaaatgcagttcaagtaacaaagtaggaaaactcagtgaaaattcatctgaaattaaaaagggaaggataaccccatcacaggtaaaaatgtctccatcgtatcatcagtccaaaggggatcccactgctaaaaagggaacctcagaacctgttctggatccacagcaaatccaagcatttgatcagctttgccgtctctaccgaggaagctccaggctggctctcctcacggaactctcccagaatcgcagcagcgagagctataggccattcagtggctcgcagagtgctcctgctttcaacagcatcttccagaatgagaacttccagctgcagctcattcctccacctgtgactgaggattgatgactccatggagcctggcccaggagaaccagagatgatcccgaggcagctggggagaggccccgcctctggtgggcttggcctccaccacctcccatgcttctgagaagaggttccaaattgggctcctgtgcccagagcgtccacagcaccattcccagtgtagactcccagtcttctccacattgctgtcatggcgtcagttcaccagactcattgattttgttttgcttgttaagcaaaggaatgtcacatacctctgtccagctttttaggaaatacatttcgcctattgcgactttttccatttaccctgaagcctagaaagtaggtggaactcacacaaatggcattccagagtctgccatactccgtctcctccagctgctggataatacagaggaacttcaacttctacagggaacagtggttggccaggctgcagtataactgaagcatgccttggagagagcagacactgtgngggccagggccatctccctttaatgtgttcatgttaaaacctatttgagtgtaagacttgccctttctaacaataaatgctctgtgtttaagttctgcaggtctcctggctggctggctggctctcagtctgtcaagtcatggaggacatttcg

SEQ ID NO: 253 - DNA, 1554 bp, Homo sapiens
  misc_feature (6): n equals a,t,g, or c
  misc_feature (81): n equals a,t,g, or c
  misc_feature (1496): n equals a,t,g, or c
  misc_feature (1523): n equals a,t,g, or c
  misc_feature (1535): n equals a,t,g, or c
actggnaatccactactatttggaaagctggtccgcctgcaggtaccggtccggaattcccgggtcgacccacgcgtccgnggacgcgtgggttctggttttgctctagtgtttgggtttcttcgcggctgctcaagatgaaccgactcttcgggaaagcgaaacccaaggctccgccgcccagcctgactgactgcattggcacggtggacagtagagcagaatccattgacaagaagatttctcgattggatgctgagctagtgaagtataaggatcagatcaagaagatgagagagggtcctgcaaagaatatggtcaagcagaaagccttgcgagttttaaagcaaaagaggatgtatgagcagcagcgggacaatcttgcccaacagtcattcaacatggaacaagccaattataccatccagtctttgaaggacaccaagaccacggttgatgctatgaaactgggagtaaaggaaatgaagaaggcatacaagcaagtgaagatcgaccagattgaggatttacaagaccagctagaggatatgatggaagatgcaaatgaaatccaagaagcactgagtcgcagttatggcaccccagaactggatgaagatgatttagaagcagagttggatgcactaggtgatgagcttctggctgatgaagacagttcttatttggatgaggcagcatctgcacctgcaattccagaaggtgttcccactgatacaaaaaacaaggatggagttctggtggatgaatttggattgccacagatccctgcttcatagatttgcatcattcaagcatatcttgtaaaacaaacacatattatgggactaggaaatatttatctttccaaatttgccataacagatttaggtttctttcctttctttgaaggaaagtttaattacattgctcttttattttttccattaagagactcattgcttgggaaatgctttcttcgtactaaaatttgattcctttttttcttatgaaaaacgaactcagtttaaaagtatttttagctcgtatgacttgttttcattcattaataataatttgaaataaaactaaggaaatggaatcttaaaagtctatgacagtgtaactctacagtctcaaaatgacctgataaattgataagacaaagatgagattattggggctgttcatattatgattcagaatcattttctattgtggtattataggttggttaaagtgatggcctttttgatgggttttgttgtgtcttgtgaacaagtcgttactgtgtccattattggaatggaattatcactactgtatcatgagtgggtattttgattctatggttccctcagtattacatcttgacttgtaatcaattatgaatatttcttgatatttaatgtataggacatttatttatactcaataaatatttttcaaaaggaaaaaaaaaaaaaaaaaaaaaaaaaaaaaaaaaggggcggcccgcnctagaggatcccccgaggggggcccangcttacgcgtgncatgcgacgtccaaagccc

SEQ ID NO: 254 - DNA, 1506 bp, Homo sapiens
  misc_feature (43): n equals a,t,g, or c
  misc_feature (1492): n equals a,t,g, or c
  misc_feature (1501): n equals a,t,g, or c
  misc_feature (1506): n equals a,t,g, or c
ctggaagaattcgcgtggcaggagaggcggggcaattttgctnagctttctcgcgggcttgcagctgcggcaagtgctggcggcggctgctcgcgcaagtcagctggcgtgggaactaccctttgtagctgagaacggcttgtttattgctacaaagactctattgacattggtagcttcagcggcagcagcttcttacggtataaagctgttgcttcctgaagaggctacaagcatccttccctaggactgctgtaagctttgagcctctagcaggagacatgcctcggggacgaaagagtcggcgccgccgtaatgcgagagccgcagaagagaaccgcaacaatcgcaaaatccaggcctcagaggcctccgagacccctatggccgcctctgtggtagcgagcacccccgaagacgacctgagcggccccgaggaagacccgagcactccagaggaggcctctaccacccctgaagaagcctcgagcactgcccaagcacaaaagccttcagtgccccggagcaattttcagggcaccaagaaaagtctcctgatgtctatattagcgctcatcttcatcatgggcaacagcgccaaggaagctctggtctggaaagtgctggggaagttaggaatgcagcctggacgtcagcacagcatctttggagatccgaagaagatcgtcacagaagagtttgtgcgcagagggtacctgatttataaaccggtgccccgtagcagtccggtggagtatgagttcttctgggggccccgagcacacgtggaatcgagcaaactgaaagtcatgcattttgtggcaagggttcgtaaccgatgctctaaagactggccttgtaattatgactgggattcggacgatgatgcagaggttgaggctatcctcaattcaggtgctaggggttattccgccccttaagtagatctgaggcagacccttgggggtgtaaaagagagtcacaggtaccccaaggagtagatgccagggtcctaagttgaaaatgatgtcgattgggggcgggggacactgtatttgatatttgtgatcagtgatcattgttcaactgcgaaatagagtgtttgcttttgataatggaaaattgtattcgttttaaaattccgtttgttgagaataacaatatgtttaaaaatataattgaacaaatttttttctttgtttcctgtcattgacatttagtataacagttttgctaacgttctaaaatgaagtcgttccatcataatctatgatcttgtacagcacttatagaaataagctgttcttttgaagttgaaatacccagtaaaatgttgaagaaggatggaggatttcttcatatctgacgtttctgaaaccctttgtgtctgctgttgtgtgaagattgacatttaccatgattttccttagttactgcagaacatagagaaaaataaaagcctaacgaatagtaaaaaaaaaaaaaaaacctnggggggggncccgn

SEQ ID NO: 255 - DNA, 654 bp, Homo sapiens
  misc_feature (8): n equals a,t,g, or c
  misc_feature (632): n equals a,t,g, or c
actcaccntattggaaaagctggtacgcctgcaggtcccggtccggaattcccgggtcgacccacgcgtccgatctttccgcgccggtgagtagcactctctgagagctccaatttcatccgtctgccatcggcgccatcctgcaatctaagccacaatggtgcgcatgaatgtcctggcagatgctctcaagagtatcaacaatgccgaaaagagaggcaaacgccaggtgcttattaggccgtgctccaaagtcatcgtccggtttctcactgtgatgatgaagcatggttacattggcgaatttgaaatcattgatgaccacagagctgggaaaattgttgtgaacctcacaggcaggctaaacaagtgtggggtgatcagccccagatttgacgtgcaactcaaagacctggaaaaatggcagaataatctgcttccatcccgccagtttggtttcattgtactgacaacctcagctggcatcatggaccatgaagaagcaagacgaaaacacacaggagggaaaatcctgggattctttttctagggatgtaatacatatatttacaaataaaatgcctcatggacaaaaaaaaaaaaaaaaaaaaaaaaagggsggsggtctaganggtccaagcttacgtacgcgtg

SEQ ID NO: 256 - DNA, 1992 bp, Homo sapiens
  misc_feature (558): n equals a,t,g, or c
gctcgccatacacctgcgcaacgccatgaccacccgcaagaaggaaacataccagtctgtgtacaactggcagtatgtgcactgcctcttcctgtggtgccgggtcctgagcactgcgggccccagcgaascctccagcccttggtctacccccttgcccaagtcatcattggctgtatcaagctcatccccactgcccgcttctacccgctgcgaatgcactgcatccgtgccctgacgctgctctcggggagctcgggggccttcatcccggtgctgcctttcatcctggagatgttccagcaggtcgacttcaacaggaagccagggcgcatgagctccaagcccatcaacttctccgtgatcctgaagctgtccaatgtcaacctgcaggagaaggcgtaccgggacggcctggtggagcagctgtacgacctcaccctggagtacctgcacagccaggcacactgcatcggcttcccggagctggtgctgcctgtggtcctgcagctgaagtcgttcctccgggagtgcaaggtggccaactactgccggcangtgcagcagctgcttgggaaggttcaggagaactcggcatacatctgcagccgccgccagagggtttccttcggcgtctctgagcagcaggcagtggaagcctgggagaagctgacccgggaagaggggacacccytgaccttgtactacagccactggcgcaagctgcgtgaccgggagatccagctggagatcagtggcaaagagcggctggaagacctgaacttccctgagatcaaacgaaggaagatggctgacaggaaggatgaggacaggaagcaatttaaagacctctttgacctgaacagctctgaagaggacgacaccgagggattctcggagagagggatactgaggcccctgagcactcggcatggggtggaagacgatgaagaggacgaggaggagggcgaggaggacagcagcaactcggagggtgaatggtcttgggatggagacccagacgcagaggcggggctggcccctggggagctgcagcagctggcccaggggccggaggacgagctggaggatctgcagctctcagaggacgactgaggcagcccatctggggggcctgtaggggctgccgggctggtggccagtgtttccacctccctggcagtcaggcctagaggctggcgtctgtgcagttgggggaggcagtagacacgggacaggctttattatttatttttcagcatgaaagaccaaacgtatcgagagctgggctgggctgggctggtgtggctgctgaagccccacagctgtgggctgctgaagtcagctccgcgggggagctgaccctgacgtcagcagaccgagaccagtcccagttccagggggaggcctgcagcccctggcccmttccaccacctctgccctccgtctgcagacctcgtccatctgcaccmggctctgcyttcactcccccaagtctttggaaatttgttcttttcctttgaagtcacattttcttttaaaattttttgttttgcatccgaaaccgaaagaaataaagcggtgggaggcagggccattgtgttgagtggtgggaaggttgccgtcctggctgcaggacgcctctcggaaagagatgttcacgtcccagtgggtgtggactcttctcttcatgatacggatgtgcggaccatcctcctgcttcaagcctgccgccgccacaggtggggccactcccgtcgctgtcaccatcgctggcagagaagctgggagttcgctccttcttcaggttccgggcggcaggcagggcgactgtcctcttgtctgccagccgcaccggttcaccggggaggatattcggcagcccgggcagtcgcagatcggaggatgcacctgcaggatccccttggacataagcgtcttcagacttttcccttccgagcggagggagcggcccgcgagccccaagcgctg

SEQ ID NO: 257 - DNA, 2273 bp, Homo sapiens
  misc_feature (2271): n equals a,t,g, or c
  misc_feature (2273): n equals a,t,g, or c
ggcacgagctggcggggaaggagaggtcaggcgctccgggctcgcccgctaggtcggggccgcggcgtcccccaccctaagtcccacctccggccgggcatgggtacccgggcgggcctggctcggcctgggcccactcactggtccagaagcagctgtaggtgcccaccaagcccatgacgacgctgctggccagggtccagccctattcaggcaggagctgctcttctggggtatcgcgatccacttaaggatgaggcagacttggtgacaagctggtctgagcagcgcttccagagccagaactgagcccagtgagagcgcaccctggggcagcctggattcctggggtgtccccggcagccacacacagccatgcactacccaactgcactcctcttcctcatcctggccaatggggcccaggcctttcgcatctgcgccttcaatgcccagcggctgacactggccaaggtggccagggagcaggtgatggacaccttagttcggatactggctcgctgtgacatcatggtgctgcaggaggtggtggactcttccggcagcgccatcccgctcctgcttcgagaactcaatcgatttgatggctctgggccctacagcaccctgagcagcccccagctggggcgcagcacctacatggagacgtatgtgtacttctatcggtcacacaaaacacaggtcctgagttcctacgtgtacaacgatgaggatgacgtctttgcccgggagccatttgtggcccagttctctttgcccagcaatgtccttcccagcctggtgttggtcccgctgcacaccactcctaaggccgtagagaaggagctgaacgccctctacgatgtgtttctggaggtctcccagcactggcagagcaaggacgtgatcctgcttggggacttcaatgctgactgcgcttcactgaccaaaaagcgcctggacaagctggagctgcggactgagccaggcttccactgggtgattgccgatggggaggacaccacagtgcgggccagcacccactgcacctatgaccgcgtcgtgctgcacggggagcgctgccggagtctgctgcacactgcggctgcctttgacttccccacgagcttccagctcaccgaggaggaggccctcaacatcagtgaccactaccccgtggaggtggagctgaagctgagccaggcgcacagcgtccagcctctcagcctcactgttctgttgctgctatcactcctgtcccctcagctgtgccctgctgcctgagcgtccccctacccccccagggcctgctgccttttgggacttaaaccccagcctcccccgtccatccagccctggggctggggggcttcaactatagttgccctgtgactgtagtccacccctgcctgccttgtttgatttggctcttgttctttggttgggcttgtgcctagattaggagaggaagccaggggccctgcactcatgccacctgccaggtagtgtagtatcaggagtggagacaaagtgggctctgggttggggtaggggaagggagggttcagaaagaggaatgaagatgttgtatgacaagaaggaaagttactgagaacaaaaacccagattggtgagataggacacttgtgcagcagatatgccaatgggccatgtttattgtggattggtaagaatcaccaggaaaccattaagccccaatagctacaaggagggtggttaatctgctatatcaaactccttccctgaaaccagcaaacaccgggaaacattttggctcattataatccggtgaacaatgcagtcaggcctgttataaccgctgagcagccacactcgcacctcctgggtgctgtagtctgtgttggtacaggcttctgcatgcctggtaaagtccagccaaggctggtcaaggcaacatctccacacagaaaatctgcaccagttatgtaagctaaaaagctgtgtgaacccaggtgtcccggaaaggggctgcaggacacagcaaaatgccagcagcrtgccggacccctcccttccatcctcctctccaaagaasagaggtcaggaaaaacactggctgggacgctagaagggtcatgtgttaactataatcacatttatggtttggaaccatcaccccaaggtaaaaaaaaaataaaaggtattcccaggtatgtttggcaaaataaaataaaggtaattaaaaacctaaaaaaaaaaaaaaaaaaaaaaaaaaaaaaaattttgcgncn

SEQ ID NO: 258 - DNA, 1504 bp, Homo sapiens
ctgtactctgccctagattgttttagcttctgttctgtaatcatgagtttggttggagatattctccatagatgatcttctactgaaatgcctaaagaagtcacaggctggcttctgttttattcagggatttttttaaaaagtcaatcagaaaagggatactggagcttcttcatgtatgtaacagcatattaaactggagacagtgatgaatcagctacaaaggtaatattgtattaaaatcatgtttaagatagctgcttttatgtgtattttatattgcatgcttttgtaaaaacatgctgggtgatgaaagattagttttagagagaaaatgttcatctgtgcagaggatgcattttcttccattaattctggaaaaaacgttcacagttatatatatggtattttgcaaaaggactattaatagaaccttttgagatgaattaatgtaagaatattttttaaataggcttactgtcaaattgcaactttttttttagatacagagtggaaaacagtgctaagtcatttggcacctccttacaaatatttttcatggtcacatttattaaatgttactacatttctgaatttttgaaaaatgtattttatcattaaatggcattattttaaagggtgaaaaactgacacagtcaattcagaaaatggactgaagtctgaataaggtcattgcatttaaaaagcatataactgtacttgactgatgagggaggtgttactttcattgtatataggtcttatttcataaacagatatcctgtatcaaataaaagtatttgttatatatttgaagttatgcatggaaaggagtgtgtttaaattgttacaaacaataatgcgtcattaaaggccatgctgatcttgcataactataagtactatgaatgaatttggttggttttggtgttgtacagctcacatgtttacacactcagtgccctaatttcccctgagggaatcgctttttaagtgatccttacagtggtgttttatgttactttattacagagctccttggttttttacttctgcacttaaatttttttaaataacatgatgatggtacattttcctctattgtctagctaagggctttcggtccaccagtaaataagatcaaatgctcttaaatgttcctgttaccatcctaatgtaaatactggatttttctgtcatttagcaccatgctgcttctgtctgtcttaatgctggcattaagatcatgagccctttttctccagtagtacaggctttgaaaactacttctattaagttattgatgcaatttgatattttttcataatctatatttaaacaaaattacatcattgcatcatcttttctaaattcatctccattaaaacttgccttaagctaccagattgcttttgccaccattggccatactgtgtgtttgtttgtttaatttactttcacaataaacttctgtgtagtaaaaaaaaaaaaaaaaaaaaaaaaa

SEQ ID NO: 259 - DNA, 1792 bp, Homo sapiens
  misc_feature (107): n equals a,t,g, or c
  misc_feature (487): n equals a,t,g, or c
  misc_feature (1306): n equals a,t,g, or c
aattcggcacgagctacatcgggggactcctctcagccttctacctgacaggagaagaggtgttccgaataaaggccatcaggctgggagagaagctcctgccggcnttcaacacccccacgggaatcccaaagggcgtggtgagcttcaaaagtgggaactggggctgggccacagccggcagcagcagcatcttggcggagtttggatccctgcacttggaattcttacacctcactgaactctctggcaaccaggtcttcgctgaaaaggtcaggaacatccgcaaggtcctcaggaagatcgaaaagccctttggcctctaccccaacttcctcagcccagtgagtgggaactgggtgcaacaccatgtctcagttggaggactcggggacagtttttatgaatatttgatcaaatcctggttgatgtcgggcaagacagatatggaggctaaaaatatgtactacgaagccttggaggcgantagagacctacttgctgaatgtytctcccggggggctgacctacattgccgagtggcgaggggggattctggaccacaagatggggcacctggcctgtttctccgggggcatgatcgcccttggcccgaggatgccaaggaagaaaagagggcccactaccgagagctcgcagcccagatcaccaagacgtgtcacgagtcatacgcccgctcagacaccaaacttgggcctgaggcttctggtttaactccggcagagaggccgtggccacccagctgagcgagagytactacatcctccggccagaggtggtggagagctacatgtacctgtggcgacagacccacaaccccatctacagggagtggggctgggaggtggtgctggccttggagaaatactgtcggacagaagccggtttctctgggatccaagacgtgtacagtagcacccccaaccacgacaacaagcagcagagcttctttctagcggagacactaaagtatctctatcttctgttctctgaagatgacttgctctccctggaagactgggtgttcaacaccgaggcccacccactcccggtgaaccactcagacagctccggcagagctggggcagacactgaccccatctcctgccgccgccctggggccgccgcaggatgccttgccttttcaggatttgagactgttctcaaagggattgggaacgaaggccccatctcgggcagacccccagcagatgtgtcggacaagcaacttcttttcctctgtgaggagacaagacttggagactcagcgatgtcaggccagggncatggccacactggcccacacattcctttctacagagaatttctatgaagcccactcacttgccattccagggccaaaggaccggaggtttgcatatccgccccttgtatttgatttgcttccttttggtttcttggtttttgtttttgcttgattttgtcttttctctacagtttagttttgtcacaattacacatatagttttcaaaatcatgcactttctaaaatggtgtcatcctgaaaaacaaaacccagtgtttgcacacacacaaaatcttgaccccgttatctatattttaaatgctttttgcccaacactgaccctatgttcaactttgtgtcatttaccttataatttgaggaggggtttccctttgggcctcagtgttacaaattactagtgctattttcattattattgtaatggaaaaatctgtggactagaataaaagagtttattgaataagaaaaaaaaaaaaaaaaaaa

SEQ ID NO: 260 - DNA, 2048 bp, Homo sapiens
  misc_feature (66): n equals a,t,g, or c
  misc_feature (67): n equals a,t,g, or c
atcccttttgatccgggcctgggctgagtgctccccccgggcttcaggtgacgcggccccgcgganntggggtcgcccgagttgggctggggaagccagggacggaggtgtccggccgtcacccctagaggagggcgtgcgggggtctgttttgcatgcgagccacccctctggctgctcctgcgggttccctgtccaggaagaagcggttggagttggatgacaacttagataccgagcgtcccgtccagaaacgagctcgaagtgggccccagcccagactgcccccctgcctgttgcccctgagcccgaggagggcgggcgggcctaccaggcctgcactgccctacaggcactgagtatacctgcaagtgtaccccgtccaggaagccctggccgtgctggagccctaygcgcggctgcccccgcacaagcatgtggctcggcccactgaggtcctggctggtacccagctcctctacgcctttttcactcggacccatggggacatgcacagcctggtgcgaagcgccaccgtatccctgagcctgaggctgccgtgctcttccgccagatggccaccgccctggcgcactgtcaccagcacggtctggtcctgcgtgatctcaagctgtgtcgctttgtcttcgctgaccgtgagaggaagaagctggtgctggagaacctggaggactcctgcgtgctgactgggccagatgattccctgtgggacaagcacgcgtgcccagcctacgtgggacctgagatactcagctcamgggcctcatactcgggcaaggcagccgatgtctggagcctgggcgtggcgctcttcaccatgctggccggccactaccccttccaggactcggagcctgtcctgctcttcggcaagatccgccgcggggcctacgccttgcctgcaggcctctcggcccctgcccgctgtctggttcgctgcctccttcgtcgggagccagctgaacggctcacagccacaggcatcctcctgcacccctggctgcgacaggacccgatgcccttagcyccaacccgatcccatctctgggaggctgcccaggtggtccctgatggactggggctggacgaagccagggaagaggagggagacagagaagtggttctgtatggctaggaccaccctactacacgctcagctgccaacagtggattgagtttgggggtagctccaagccttctcctgcctctgaactgagccaaaccttcagtgccttccagaagggagaaaggcagaagcctgtgtggagtgtgctgtgtacacatctgctttgttccacacacatgcagttcctgcttgggtgcttatcaggtgccaagccctgttctcggtgctgggagtacagcagtgagcaaaggagacaatattccctgctcacagagatgacaaactggcatccttgagctgacaacacttttccatgaccataggtcactgtctacactgggtacactttgtaccagtgtcggcctccactgatgctggtgctcaggcacctctgtccaaggacaatccctttcacaaacaaaccagctgcctttgtatcttgtaccttttcagagaaagggaggtatccctgtgccaaaggctccaggcctctcccctgcaactcaggacccaagcccagctcactctgggaactgtrttcccagcatctctgtcctcttgattaagagattctccttccaggcctaagcctgggatttgggccagagataagaatccaaactatgaggctagttcttgtctaactcaagactgttctggaatgagggtccaggcctgtcaaccatggggcttctgacctgagcaccaaggttgagggacaggattaggcagggtctgtcctgtggccacctggaaagtcccaggtgggactcttctggggacacttggggtccacaatcccaggtccatactctaggttttggataccatgagtatgtatgtttacctgtgcctaataaaggagaattatgaaataaaaaaaaaaaaaaaaaaactcgac

SEQ ID NO: 261 - DNA, 1282 bp, Homo sapiens
  misc_feature (1244): n equals a,t,g, or c
  misc_feature (1261): n equals a,t,g, or c
  misc_feature (1265): n equals a,t,g, or c
ctcgctgtcgcgccattttgccggggtttgaatgtgaggcggagcggcggcaggagcgggtagtgccagctacggtccgcggctggggttccctcctccgtttctgtatccccacgagatcctatagcaatggaactcagcgatgcaaatctgcaaacactaacagaatatttaaagaaaacacttgatcctgatcctgccatccgacgtccagctgagaaatttcttgaatctgttgaaggaaatcagaattatccactgttgcttttgacattactggagaagtcccaggataatgttatcaaagtatgtgcttcagtaacattcaaaaactatattaaaaggaactggagaattgttgaagatgaaccaaacaaaatttgtgaagccgatcgagtggccattaaagccaacatagtgcacttgatgcttagcagcccagagcaaattcagaagcagttaagtgatgcaattagcattattggcagagaagattttccacagaaatggcctgacttgctgacagaaatggtgaatcgctttcagagtggagatttccatgttattaatggagtcctccgtacagcacattcattatttaaaagataccgtcatgaatttaagtcaaacgagttatggactgaaattaagcttgttctggatgcctttgctttgcctttgactaatctttttaaggccactattgaactctgcagtacccatgcaaatgatgcctctgccctgaggattctgttttcttccctsatcctgatctcaaaattgttctatagtttaaactttcaggatctccctgaattttttgaagataatatggaaacttggatgaataattttcatactctcttaacattggataataagcttttacaaactgatgatgaagaggaagccggcttattggagctcttaaaatcccagatttgtgataatgccgcactctatgcacaaaagtacgatgaagaattccagcgatacctgcctcgttttgttacagccatctgggaatttactagttacaacgggtcaagaggttaaatatgatttgttggtaagtaatgcaattcaatttctggcttcagtttgtgagagacctcattataagaatctatttgaggaccagaacacgctgacaagtatctgtggaaaaggttattgtgcctaacatgggatttagagctgctgatggaagaagcattgaagtaattctgaggggttacagaggngagatttggaagggtcnggtnttggtactagacgcagg

SEQ ID NO: 262 - DNA, 599 bp, Homo sapiens
ggcacgagccccggcagaggcggargcggagtcggcctgagaggtctctcgtcgctgcaggcgcctcagcccagccgcgtgccttggcccatggccgcctactcttaccgccccggccctggggccggccctgggcctgctgcaggcgcggcgctgccggaccagagcttcctgtggaacgttttccagagggtcgataaagacaggagtggagtgatatcagacaccgagcttcagcaagctctctccaacggcacgtggactccctttaatccagtgactgtcaggtcgatcatatccatgtttgaccgtgagaacaaggccggcgtgaacttcagcgagttcacgggtgtgtggaagtacatcacggactggcagaacgtcttccgcacgtacgaccgggacaactccgggatgatcgataagaacgagctgaagcaggccctctmagtttcggctaccggctctctkaccagttccacgacatcctcattcgaaagkttgacaggcargggacggggcaratcgscttcgacgasttaatccaaggctggcatggcctgcagaggtttacggatatattcaaaggtttcggcacg

SEQ ID NO: 263 - DNA, 1261 bp, Homo sapiens
ggcacgaggttgttcggagcgggcgagcggagttagcagggctttactgcagagcgcgccgggcactccagcgaccgtggggatcagcgtaggtgagctgtggccttttgcgaggtgctgcagccatagctacgtgcgttcgctacgaggattgagcgtctccacccagtaagtgggcaagaggcggcaggaagtgggtacgcaggggcgcaaggcgcacagcctctagacgactcgctttccctccggccaacctctgaagccgcgtcctactttgacagctgcagggccgcggcctggtcttctgtgcttcaccatctacataatgaatcccagtatgaagcagaaacaagaagaaatcaaagagaatataaagaatagttctgtcccaagaagaactctgaagatgattcagccttctgcatctggatctcttgttggaagagaaaatgagctgtccgcaggcttgtccaaaaggaaacatcggaatgaccacttaacatctacaacttccagccctggggttattgtcccagaatctagtgaaaataaaaatcttggaggagtcacccaggagtcatttgatcttatgattaaagaaaatccatcctctcagtattggaaggaagtggcagaaaaacggagaaaggcgctgtatgaagcacttaaggaaaatgagaaacttcataaagaaattgaacaaaaggacaatgaaattgcccgcctgaaaaaggagaataaagaactggcagaagtagcagaacatgtacagtatatggcagagctaatagagagactgaatggtgaacctctggataattttgaatcactggataatcaggaatttgattctgaagaagaaactgttgaggattctctagtggaagactcagaaattggcacgtgtgctgaaggaactgtatcttcctctacggatgcaaagccatgtatatgaaatgcattaatatttgactgttgagaattttactgccgaagtttacctccactagttctttgtagcagagtacataactacataatgccaactctggaatcaaatttccttgtttgaatcctgggaccctattgcattaaagtacaaatactatgtatttttaatctatgatggtttatgtgaataggattttctcagttgtcagccatgacttatgtttattactaaataaacttcaaactcctgttgaacattgtgtataacttagaataatgaaatataaggagtatgtgtagaaaaaaaaaa

SEQ ID NO: 264 - DNA, 1020 bp, Homo sapiens
ctgctcctggccaacatccagtattttatcttgactgtcctaaccttaccttagatgctaacagaagggtcctgctcaaataacactgggtgctatattgatgggtaaatgtgtacatcctattccttcctctttatctcacaatttttgtctccactaagcaagaagtaaactaacacttcgtcactctaaagaaataacttatgtaaaactcttagtaaccctgtttgtcttcaaatgagtaaatagaccaaagtggggggacaattttctagttctgtagagggaaaaacatctgagtcaacattttgaaatgcagagggtattggtacatgacgacatggaaaagggcacttttaaacacagcttactcttcctcaagtacagagagtatatagtgaatcaaaactaactacagccattctttttaaagcccaagggatggagcaaaggtgtaaggatgttacctgtttgttttaatcagagagcaaaaagaagtcacaatagtttgggagaaaaagtagtatggtgagtaaggttatgcgtataatttcatactgaatttattactatttgggatgtacgtcartgttctaacaaacactgccaacacgtcaattttttaaaaagcgtgggccacattgctaagaatttgttaaagcataactgtattttttgttttagggccttattgatgttttgccgttccaatgtatgcatttttttactcaataaacttgtcttaattttagaactgtctgatgatttcgtactggaaagaactactcaaagacggcagtgtaaaagcaagtcttaggaaagtcccattttatttgtgtctaacaaacatacaggaactgaaatatttttgttaaatcctgggatgcaccgaagtaacttaaaacaaaccgttcaacaggttcccccaaccgcccacgccacataaagaacagacatatctacacttgaaaaagctcatacctgtctcagttctgaaagtcccttaaggattgcttgctg

SEQ ID NO: 265 - DNA, 571 bp, Homo sapiens
  misc_feature (557): n equals a,t,g, or c
  misc_feature (565): n equals a,t,g, or c
ctttacggcasgmgtccgcgtcgctagctagtcgttctgaagcggcggccagagaagagtcaagggcacgagcatcgggccatgcctttcttggacatccagaaaaggttcggccttaacatagatcgatggttgacaatccagagtggtgaacagccctacaagatggctggtcgatgccatgcttttgaaaaagaatggatagaatgtgcacatggaatcggttatactcgggcagagaaagagtgcaagatagaatatgatgatttcgtagagtgtttgcttcggcagaaaacgatgagacgtgcaggtaccatcaggaagcagcgggataagctgataaaggaaggaaagtacacccctccacctcaccacattggcaagggggagcctcggccctgaacagagcagctgctgatgtctggaggctgattttcctgttctctgttctccactggaaaggttgtttacgacaaacctccttgtcaaagtgtgtaaaaataaaggattgctccatcctaaaaaaaaaaaaaaaaaaaaaaaatttgggggggggnccccgtancccatt

SEQ ID NO: 266 - DNA, 1350 bp, Homo sapiens
  misc_feature (204): n equals a,t,g, or c
  misc_feature (1313): n equals a,t,g, or c
tgccgccatcgtcgtggggcttctggggcagctagggctgcccgccgcgctgcctgcgccggaccggggcgggtccagtcccgggcgggccgtcgcgggagagaaataacatctgctttgctgccgagctcagaggagaccccagacccctcccgcagccagagggctggagcctgctcagaggtgctttgaagatgccggagncccgcctctgctgttggcagctgtgttgctgggcctggtgctgctggtggtgctgctgctgcttctgaggcactggggctggggcctgtgccttatcggctggaacgagttcatcctgcagcccatccacaacctgctcatgggtgacaccaaggagcagcgcatcctgaaccaygtgctgcagcatgcggagcccgggaacgcacagagcgtgctggaggccattgacacctactgcgagcagaaggagtgggccatgaacgtgggcgacaagaaaggcaagatcgtggacgccgtgattcaggagcaccagccctccgtgctgctggagctgggggcctactgtggctactcagctgtgcgcatggcccgcctgctgtcaccaggggcgaggctcatcaccatcgagatcaaccccgactgtgccgccatcacccagcggatggtggatttcgctggcrtgaaggacaaggtcacccttgtggttggagcgtcccaggacatcatcccccagctgaagaagaagtatgatgtggacacactggacatggtcttcctcgaccactggaaggaccggtacctgccggacacgcttctcttggaggaatgtggcctgctgcggaaggggacagtgctactggctgacaacgtgatctgcccaggtgcgccagacttcctagcacacgtgcgcgggagcagctgctttgagtgcacacactaccaatcgttcctggaatacagggaggtggtggacggcctggagaaggccatctacaagggcccaggcagcgaagcagggccctgactgccccccccggcccccctctcgggctctctcacccagcctggtactgaaggtgccagacgtgctcctgctgaccttctgcggctccgggctgtgtcctaaatgcaaagcacacctcgccgagcctgcgccctgacatgctaacctctctgaactgcaacactggattgttcttttttaagactcaatcatgacttctttactaacactggctagctatattatcttatatactaatatcatgttttaaaaatataaaatagaaattaagaatctaaawaaaawaaaaaaacggggggcgctntaaagggtccaagcttaacgtaagcgtgcatgggaag

SEQ ID NO: 267 - DNA, 1319 bp, Homo sapiens
  misc_feature (7): n equals a,t,g, or c
  misc_feature (61): n equals a,t,g, or c
gcaaganagaaattaaccctcactaaagggaacaaaagctggagctccaccgcggtggcgnccgctctagaactagtggatcccccgggctgcaggaattcggcacgagagactccgcgacctactgacccggcgactgacaggctccaactacccgggactcagtattagccttcgcctcactggctcctctgcacaagaggmggcttccggagtagccctcggtgaagccccagaccacagctatgagtcccttcgtgtgacgtctgcgcagaaacatgttctgcatgtccagctcaaccggcccaacaagaggaatgccatgaacaaggtcttctggagagagatggtagagtgcttcaacaagatttcgagagacgctgactgtcgggcggtggtgatctctggtgcaggaaaaatgttcactgcaggtattgacctgatggacatggcttcggacatcctgcagcccaaaggagatgatgtggcccggatcagctggtacctccgtgacatcatcactcgataccaggagaccttcaacgtcatcgagaggtgccccaagcccgtgattgctgccgtccatgggggctgcattggcggaggtgtggaccttgtcaccgcctgtgacatccggtactgtgcccaggatgctttcttccaggtgaaggaggtggacgtgggtttggctgccgatgtaggaacactgcagcgcctgcccaaggtcatcgggaaccagagcctggtcaacgagctggccttcaccgcccgcaagatgatggctgacgaggccctgggcagtgggctggtcagccgggtgttcccagacaaagaggtcatgctggatgctgccttagcgctggcggccgagatttccagcaagagccccgtggcgtgcagagcaccaaggtcaacctgctgtattcccgcgaccattcggtggccgagagcctcaactacgtggcgtcctggaacatgagcatgctgcagacccaagacctcgtgaagtcggtccaggccacgactgagaacaaggaactgaaaaccgtcaccttctccaagctctgagagccctcgcgtcccaggccccagccagggggccggccttgtcccgcctcatccacagaaagggaggatgggcgatgacagttgtttctatgccttctgacccagtttcccagtttataactttatgacaatgagtttctcaagcccaaggccttatcttcaccccacaaacaataaagcaaagtaaagaaaaaaaaaaaaaaaaaaaaaaaaaaaaaaaaaaaaaaaaaaaaaaaaaaaggggggggggc

SEQ ID NO: 268 - DNA, 3694 bp, Homo sapiens
  misc_feature (746): n equals a,t,g, or c
cggagctgcgccctggtgtgcaagcactggtaccgctgcctgcacggcgatgagaacagcgaggtgtggcggagcctgtgcgcccgcagcctggcagaagaggctctgcgcacggacatcctgtgcaacctgcccagctacaaggccaagatacgtgcttttcaacatgccttcagcactaatgactgctccaggaatgtctacattaagaagaatggctttactttacatcgaaaccccattgctcagagcactgatggtgcaaggaccaagattggtttcagtgagggccgccatgcatgggaagtgtggtgggagggccctctgggcactgtggcagtgattggaattgccacaaaacgggcccccatgcagtgccaaggttatgtggcattgctgggcagtgatgaccagagctggggctggaatctggtggacaataatctactacataatggagaagtcaatggcagttttccacagtgcaacaacgcaccaaaatatcagataggagaaagaattcgagtcatcttggacatggaagataagactttagcttttgaacgtggatatgagttcctgggggttgcttttagaggacttccaaaggtctgcttatacccagcagtttctgctgtatatggcaacacagaagtgactttggtttaccttggaaaacctttggacggatgacagtggctttcttgtgatgacmgacasaatggaggagagatctgcttatgggnaaktasaaccatgaagtgactgtcacacatgcatgtccaagaaacatcctgaaaacacatgaagtcgtaaactggagaagcagctctacagcagagattatctcgtgtttcctctttctactgggccagaaaaatcctcagggttgcagttggttgagtgggcagttgacatatgcatgttgcacccgatgttgtctctaagttagcaatgtgttatttccagctttaaaggtgagattgtagagatgctgtcaaagggataaggaaatagcaagatttttaagtagtgtgtttgtgaagactgatcccattttacaactgcctgttctttctccagtccttttttttccagccagcttgactattagaaaagtatgaaactggttgggttttatttaatatttttaatatattgagaagcatggtctgcctggactgcacttctctaaaagtgagatataaaattgtgcagctattttaaaagttgtatataatatgtgtgtaaaaaaaaaaaactgtaaaaaagaaaggacaaacaggttgttttgttctagttctaatttcttaaaaaccactacatggttacaaaattggaataacattttggggggacaactgggttaactacaaagaagaggatttwaagaggagatgtgttgwattgacycatttkgwatwattttwggcttacagttcccatagctgttagagtctggtttgtttttgtttttactctcaaaatcatagtaaagatctctcagtctcctggctaaagattgaaggaaggcaaatctatttctaattatacatatatcagtaaggatgatctcaacataatagtaatgtgtatcttttggtatccagttttatttttggccttctaagaaagtgtctcataacacagaacattgccatttgctcttgtaggcctcaaatatgaaagctattagtcatagagcctaggaaaaaaagaattgattaatggtccttttattttgtaaccttataaatgctgtagatattatcaaaaaaattttaatttcatattgtttacatcatgcaactaatctaagcctcaaactcgttattggggctataaagaaaacgtttacttacccagctgaaacaggttaagaatattcttaatctcattatagataattgcccccatgggacttgaaatacaacaccttgtgctgaaaacttcagggttggcaatatttgaaggtttcgttgtaraagagtttaacattaactcctattttgacttacaaatcttgtttctcatcactaaaatgcttttgaattaataatccaacccacatgagctgagagtttttcttttgttagaaaagaaacagacatctttctgtatgaaagtataaattgtatggttttagatacataagaattgacaaaagcgagcgaaatctttgtacttctgagttcttgctgtatgtatgttttgttttaaatctgattagggacacccagcagctggccgggattcttggattgctccttgggagttaagattgtcaatactcctgtgaagcaagggatttcagccatagaacaaagatttattgttgccacctgaaaagtttacaagtatttattgtgtatttgatacattgcttgaaaagatgaaatctgttaaagattcttttcgatgtccaggttaagargaaacctccttgtattgagtgaactatatgttaaatgtattagagaatgtaggtggtatagaaattgatttttcttggtgtagaacaactcagttcggcaaagtttaaaatttgattaaacaagagaagtggttcaggttgaagatggacttgttaggaagtgatcaagtcctttaagtacttgtttctttttcaggttgtgatgtggccattccgaattttgttgagagtttggtttataattgtctcttttgtcttgttagtaaacattcatttgcaacagttttgaaggtgctgagtggaaaaccgaaacacatggttattgcgtattggacctagaatgaaataattgcctcaatatttaacaacaagccattcttatctcaaagatttaaattcccgaatgtcccattcgcaaatcatatgcaattgaagtgagcagcatgagcatctgggtcatgagggccttcatttacgtaaatttgtcactaaaacccagtagtagctctacaaaatcttaaactgctgcagtgctcaaggagatggaatatctttgtcattggtgctgaggagagcatttcggtagaagacagttgcgcctgaagattgagtgtaaatcattcaaaccagtggttctcagtgttggctgtatacactttgtagtcactttggaatgttggaagacacatcgatgcttgggttccgtatgccaagattctgatgttggtctggaatatgagctggtcataaggatttttaaaaactttctggtcatttcaatatgctgccaaggttgagaaccactgttgtaaaattcaccttgagttttctcatctgcaaaatagaaaaaaaaaatccttgctccctcccttcactacctcacaaggatattgagggtaaaggagaaaataatgggaaagtgcttgtgccgtggatgaaaagtgctattaaaagtcaaaggagtgttctgtttcaattcatagtatgatcagggaaagtgtaactgagtatactttgttgacttgggaaacctggagcactttctttggttggttaacgaagcatgcagatgtggaagcagacgttactattatccctactatggtcttctgtcatactgagacaggctgttttaattacctggttttacataggaaagaagaaatattaaggcttaaagtttgtaatgatcaatggctcataattcattaaatcttttcatacaaggaaaaaaaaaaaaaaaaaaaaaaaaaaaaaaaa

SEQ ID NO: 269 - DNA, 1242 bp, Homo sapiens
  misc_feature (4): n equals a,t,g, or c
  misc_feature (31): n equals a,t,g, or c
  misc_feature (46): n equals a,t,g, or c
  misc_feature (460): n equals a,t,g, or c
  misc_feature (1233): n equals a,t,g, or c
ccanccctcactaaagggaacaaaagctggngctccaccgcggtgncgaccgctctagaactagtggatcccccgggctgcaggaattcggcaccgcaaaaaaatttaaaaaatacagtgttttgtattgatatatgtactgtgtgtgtctgtgtgtgtgagatcaagatcaggttttgattggtgatgtactattactgttgtccttggtcagggacacagaggatgtttggggtttggtggtgagacattatctaacacgtgctgtgtcctttttgggtttgagccccacaccagtgagaagcatcagcaccgtgaacttgtctgagaatagcagtgttgtcatccccccacccgactacttggaatgcttatccatgggggcagytgccgacaggagagcagattcggccaggacgacatccacctttaaggccccagcgtccaagcccgagaccgnggctcctaacgatgccaacgggactgcaaagccgccttttctcagcggagaaaacccctttgccactgtgaaactccgcccgactgtgacgaatgatcgctcggcacccatcattcgatgagaggacagccaaggactctcccgggcctctccggttctcccttgcggaatgatgggcgcatcctgtctgccacgtgctgacggtcgggaagcttcagtggagaggcctaactctaatgtcgcctgcttaagcaaatcatgcttctctgtttcacgtagttgggttgacaagtttctgcctttaagataaatgagtaatagtctaatgaccagctcagccatttaaaatattttcttcctattctgttcaagaaacagtaaacttggtttcaatctttactgtattttttaaatgaattttttccttaataacagccagaataagggatagtctatgctttcaggactggctttctgcacctgatatgaatgagaccagttttattttataaagcatgtgctcttaatagcattatgtctaaagaagatatcacgtaagtttgcatcttagcatgcaaatcataattttaagcaatataaattatgaaaatactatataaatgtaatttaacttaaaatgtttaagtgtagagcttccagagrtgggaggaaacccccaccctccctccaaccacgccagagsctgtaggagtgctaaggacgstttgcctggccctttatcacagccacacgtaggcacytcgacgggaatnctcccttcc

SEQ ID NO: 270 - DNA, 2057 bp, Homo sapiens
  misc_feature (22): n equals a,t,g, or c
  misc_feature (2053): n equals a,t,g, or c
  misc_feature (2054): n equals a,t,g, or c
cggagcggtttgtaatgtattnctggattttattttgctgtattagctcctcaagagttactgatctatgaaatggcagagaatggaaaaaattgtgaccagagacgtgtagcaatgaacaaggaacatcataatggaaatttcacagacccctcttcagtgaatgaaaagaagaggagggagcgggaagaaaggcagaatattgtcctgtggagacagccgctcattaccttgcagtatttttctctggaaatccttgtaatcttgaaggaatggayctcaaaattatggcatcgtcaaagcattgtggtgtcttttttactgctgcttgctgtgcttatagctacgtattatgttgaaggagtgcatcaacagtatgtgcaacgtatagagaaacagtttcttttgtatgcctactggataggcttaggaattttgtcttctgttgggcttggaacagggctgcacacctttctgctttatctgggtccacatatagcctcagttacattagctgcttatgaatgcaattcagttaattttcccgaaccaccctatcctgatcagattatttgtccagatgaagagggcactgaaggaaccatttctttgtggagtatcatctcaaaagttaggattgaagcctgcatgtggggtatcggtacagcaatcggagagctgcctccatatttcatggycagagcagctcgcctctcaggtgctgaaccagatgatgaagagtatcaggaatttgaagagatgctggaacatgcagagtctgcacaagactttgcctcccgggccaaactggcagttcaaaaactagtacagaaagttggattttttggaattttggcctgtgcttcaattccaaatcctttatttgatctggctggaataacgtgtggacactttctggtacctttttggaccttctttggtgcaaccctaattggaaaagcaataataaaaatgcatatccagaaaatttttgttataataacattcagcaagcacatagtggagcaaatggtggctttcattggtgctgtccccggcataggtccatctctgcagaagccatttcaggagtacctggaggctcaacggcagaagcttcaccacaaaagcgaaatgggcacaccacagggagaaaactggttgtcctggatgtttgaaaagttggtcgttgtcatggtgtgttacttcatcctatctatcattaactccatggcacaaagttatgccaaacgaatccagcagcggttgaactcagaggagaaaactaaataagtagagaaagttttaaactgcagaaattggagtggatgggttctgccttaaattgggaggactccaagccgggaaggaaaattcccttttccaacctgtatcaatttttacaacttttttcctgaaagcagtttagtccatactttgcactgacatactttttccttctgtgctaaggtaaggtatccaccctcgatgcaatccaccttgtgttttcttagggtggaatgtgatgttcagcagcaaacttgcaacagactggccttctgtttgttactttcaaaaggcccacatgatacaattagagaattcccaccgcacaaaaaaagttcctaagtatgttaaatatgtcaagctttttaggcttgtcacaaatgattgctttgttttcctaagtcatcaaaatgtatataaattatctagattggataacagtcttgcatgtttatcatgttacaatttaatattccatcctgcccaacccttcctctcccatcctcaaaaaagggccattttatgatgcattgcacaccctctggggaaattgatctttaaattttgagacagtataaggaaaatctggttggtgtcttacaagtgagctgacaccattttttattctgtgtatttagaatgaagtcttgaaaaaaactttataaagacatctttaatcattccaaaaaaaaaaaaaaaaaaaaaaaaaaaaaaaaaaaaaaaaaaaaaaaaaaaaaaaaaaaaaaaggaaaaaaaaaaaaaaaannaaa

SEQ ID NO: 271 - DNA, 960 bp, Homo sapiens
  misc_feature (4): n equals a,t,g, or c
  misc_feature (31): n equals a,t,g, or c
  misc_feature (951): n equals a,t,g, or c
  misc_feature (956): n equals a,t,g, or c
aagnatagaaattaaccctcacgtaaagggnacaaaagctggagctccaccgcggtgcggccgctctagaactagtggatcccccgggctgcaggaattcggcacgagctcttccacccctgccaggcccagcagccaccacagcgcctgcttcctcggccctgaaatcatgcccctaggtctcctgtggctgggcctagccctgttgggggctctgcatgcccaggcccaggactccacctcagacctgatcccagccccacctctgagcaaggtccctctgcagcagaacttccaggacaaccaattccaggggaagtggtatgtggtaggcctggcagggaatgcaattctcagagaagacaaagacccgcaaaagatgtatgccaccatctatgagctgaaagaagacaagagctacaatgtcacctccgtcctgtttaggaaaaagaagtgtgactactggatcaggacttttgttccaggttgccagcccggcgagttcacgctgggcaacattaagagttaccctggattaacgagttacctcgtccgagtggtgagcaccaactacaaccagcatgctatggtgttcttcaagaaagtttctcaaaacagggagtacttcaagatcaccctctacgggagaaccaaggagctgacttcggaactaaaggagaacttcatccgcttctccaaatctctgggcctccctgaaaaccacatcgtcttccctgtcccaatcgaccagtgtatcgacggctgagtgcacaggtgccgccagctgccgcaccagcccgaacaccattgagggagctgggagaccctccccacagtgccacccatgcagctgctccccaggccaccccgctgatggagccccaccttgtctgctaaataaacatgtgccctcaggaaaaaaaaaaaaaaaaaaaaaaaaaaggggggggncccgntccc

SEQ ID NO: 272 - DNA, 1167 bp, Homo sapiens
ggcacgagggaagtaggtttctacccgaccgcattttacgtggtgctgcatttccggtagcggcggcgggaaatcggctgtgggagagaggctaggcctctgaggaggcgaatccggcgggtatcagagccatcagaaccgccaccatgacggtgggcaagagcagcaagatgctgcagcatattgattacaggatgaggtgcatcctgcaggacggccggatcttcattggcaccttcaaggcttttgacaagcacatgaatttgatcctctgtgactgtgatgagttcagaaagatcaagccaaagaactccaaacaagcagaaagggaagagaagcgagtcctcggtctggtgctgctgcgaggggagaatctggtctcaatgacagtagagggacctcctcccaaagatactggtattgctcgagttccacttgctggagctgccgggggcccagggatcggcagggctgctggcagaggaatcccagctggggttcccatgccccaggctcctgcaggacttgctgggccagtccgtggggttggcgggccatcccaacaggtgatgaccccacaaggaagaggtactgttgcagccgctgcagctgctgccacagccagtattgccggggctccaacccagtacccacctggccgtgggggtcctcccccacctatgggccgaggagcaccccctccaggcatgatgggcccacctcctggtatgagacctcctatgggtcccccaatggggatcccccctggaagagggactccaatgggcatgccccctccgggaatgcggcctcctccccctgggatgcgaggccttctttgacccttggccacagagtatggaagtagctccgcagaggcgtgggctcgattcctcagggccacgttaccacagacctgtttgtttcttatgctgttgttcgtggagtctcatgggattgtctggtttcccttacagggccccctcccccgggaatgcgcccaccaaggccctagactcatcttggccctcctcagctccctgcctgtttcccgtaaggctgtacatagtccttttatctccttgtggcctatgaaactggtttataataaactcttaagagaacattaaaaaaaaaaaaaaaaactyrrgggggggcccggtccca

SEQ ID NO: 273 - DNA, 2771 bp, Homo sapiens
  misc_feature (16): n equals a,t,g, or c
  misc_feature (27): n equals a,t,g, or c
  misc_feature (42): n equals a,t,g, or c
  misc_feature (64): n equals a,t,g, or c
  misc_feature (2715): n equals a,t,g, or c
  misc_feature (2717): n equals a,t,g, or c
tcctcactaaagggancaaaagctggngctccaccgcggtgncgaccgctctagaactagtggntcccccgggctgcaggaattcggcacgagccsacccgcctcttggctcctctcctctaggccgtcgctttcgggttctctcatcgcttcgtcgttcgccaatgtttgaggagaaggccagcagtccttcagggaagatgggaggcgaggagaagccgattggtgctggtgaagagaagcaaaaggaaggaggcaaaaagaagaacaaagaaggatctggagatggaggtcgagctgagttgaatccttggcctgaatatatttacacacgtcttgagatgtataatatactaaaagcagaacatgattccattctggcagaaaaggcagaaaaagatagcaagccaattaaagtcactttgcctgatggtaaacaggttgatgcggaatcttggaaaactacaccatatcaaattgcctgtggaattagtcaaggcctggccgacaacaccgttattgctaaagtaaataatgttgtgtgggacctggaccgccctctggaagaagattgtaccttggagcttctcaagtttgaggatgaggaagctcaggcagtgtattggcactctagtgctcacataatgggtgaagccatggaaagagtctatggtggatgtttatgctacggtccgccaatagaaaatggattctattatgacatgtacctcgaagaagggggtgtgtctagcaatgatttctcttctctggaggctttgtgtaagaaaatcattaaagaaaaacaagcttttgaaagactggaagttaagaaagaaactttactggcaatgtttaagtacaacaagttcaaatgccggatattgaatgaaaaggtgaatactccaactaccacagtctatagatgtggccctttgatagatctctgccggggtcctcatgttagacacacgggcaaaattaaggctttaaaaatacacaaaaattcctccacgtactgggaaggcaaagcagatatggagactctccagagaatttatggcatttcattcccagatcctaaaatgttgaaagagtgggagaagttccaagaggaagctaaaaaccgagatcataggaaaattggcagggaccaagaactatatttctttcatgaactcagccctggaagttgcttttttctgccaaaaggagcctacatttataatgcacttattgaattcattaggagcgaatataggaaaagaggattccaggaggtagtcaccccaaacatcttcaacagccgactctggatgacctcgggccactggcagcactacagcgagaacatgttctcctttgaggtggagaaggagctgtttgccctgaaacccatgaactgcccaggacactgccttatgtttgatcatcggccaaggtcctggcgagaactgcctctgcggctagctgattttggggtacttcataggaacgagctgtctggagcactcacaggactcacccgggtacgaagattccaacaggatgatgctcacatattctgtgccatggagcagattgaagatgaaataaaaggttgtttggattttctacgtacggtatatagcgtatttggattttcttttaaactaaacctttctactcgcccggaaaaattccttggagatatcgaagtatgggatcaagctgagaaacaacttgaaaacagtctgaatgaatttggtgaaaagtgggagttaaactctggagatggagctttctatggcccaaagattgacatacagattaaagatgcgattgggcggtaccaccagtgtgcaaccatccagctggatttccagttgcccatcagatttaatcttacttatgtaagccatgatggtgatgataagaaaaggccagtgattgttcatcgagccatcttgggatcagtggaaagaatgattgctatcctcacagaaaactatgggggcaaatggcccttttggctgtcccctcgccaggtaatggtagttccagtgggaccaacctgtgatgaatatgcccaaaaggtacgacaacaattccacgatgccaaattcatggcagacattgatctggatccaggctgtacattgaataaaaagattcgaaatgcacagttagcacagtataacttcattttagttgttggtgaaaaagagaaaatcagtggcactgttaatatccgcacaagagacaataaggtccacggggaacgcaccatttctgaaactatcgagcggctacagcagctcaaagagttccgcagcaaacaggcagaagaagaattttaatgaaaaaattacccagattggctccatggaaaaggaggaacagcgtttccgtaaaattgactttgtactctgaaaacgtcaatttatattgaacttggaggagtttggcaaagtctgaataggtcaacctgcaggcgtaactatttttgacctagtcagtttttaaacaatgtgcatttgaaggagttaattaaaagagagccaataaaatgattttactcattcagtatctgagtactggaagtgaaacatgaggaatgctttagtgtaatgtgggagaacttttttgtaaatttaatgcaattgaaaaagttttcaaattcaattaagataactagaattggattatggtgtaaaaataaaaaaaaaatttattcananaaaaaaaaaaaaaaaaaaaaagctacctcggccgcgaccacgctaagccgaatt

SEQ ID NO: 274 - DNA, 1889 bp, Homo sapiens
  misc_feature (15): n equals a,t,g, or c
  misc_feature (57): n equals a,t,g, or c
  misc_feature (87): n equals a,t,g, or c
  misc_feature (113): n equals a,t,g, or c
  misc_feature (1676): n equals a,t,g, or c
cacgacgtccgcggnacggtgggacggaacgcgtgggcggacgcgtgggcggacgcntgggttcggaaacctatcgattacacagtnctggatgatgtgggccatggtgtcangcatggaaatagaccagcctgcaggaactggcacactgtcgagaacaaatcctcctactcagaaaccgccaagtcctcccatgtcaggccggggaacactgggacggaatactccttataaaaccctggaacctgttaaacccccaacagttcctaatgactatatgaccagtcctgctaggcttggaagtcagcatagtccaggcaggacagcatctttaaatcagagaccaaggacacacagtggaagtagtggaggaagtggaagtcgagaaaacagtggtagcagtagtattggcattcccattgctgtgcctacaccttcgccacccactattggaccagcagccccgggctcagctcctggttcccagtatggcacaatgaccaggcagatatctcgacacaactctactacttcttcgacatcttctggtggatacagacgaactccctctgtgactgctcaattttctgctcagcctcatgttaatggaggtccactttattctcaaaattcaatttctattgctccaccccctccccctatgcctcagttgactccacagatacctctcacaggcttcgtggccagggtgcaggaaaacattgctgatagtccaactccaccgccaccacctccaccagatgacattcccatgtttgatgactctccacctcccccaccaccaccaccagtggattatgaagatgaggaggctgcagtagttcagtataatgatccatatgcagatggggatcctgcttgggcccccaagaattatattgagaaagttgttgcaatatatgattatacaaaagacaaggatgatgagctgtcatttatggagggtgcaatcatttatgttataaagaagaatgatgatggctggtatgaaggagtctgcaatcgagtgactggtctgttccctgggaactatgttgaatcaatcatgcactatactgattaatttttttttttcttttgaagtagattcttattactcagtcatactgtgggactattatggttaacagaactgtcttaatatgttttaaaatgtgcccatattttcagaacatgctgttttattggtaaattgaatgtctacctgtaagcataaatctttgaggcagtttatgtattgctgaatagcaatttatacaagaagctgtccataactgattatgcttatgtacttacttacacatttttaactttatgaccagcctaaatattctgggggaagtggggtataatatttaacgaatcatgattcagattgtaccattacatgtttcagtgcagcatggttactaacgctatgtcagactaatattaaaatcagaaaatttaaatgctggtgctggtcagactttttttgttagattctctcatttaaaaaaaatactgtttgtttaaagcatgcataaaaatttatgtattgaaatatacttaaaaattcaagatgcttcccatttgtgtaatatttacctggaggactcgtacttaggtgtcttaacgtgaattgagtctccaaggtctccatgtgaaacaaaagnagcaaaaagagaattatctgtaatgttgtaatttgtacctaagttttttaatgagtgaaatttgcattataaactttttccattcataaatacataagtgaaccaaaggtttttgtcctttccttcactgatttgctttaaaaaaaataaaagataatgatttattgcagaaaaaaaaaaaaaaaaaaaaaaaaaaaaaataaaaaaaataaa

SEQ ID NO: 275 - DNA, 604 bp, Homo sapiens
ttttccgggccacctgggtcctcagccagtgcctttgaaacatttctgcctgtaatgtcagggccaaattgcgttactgagcatgttctgaccggcccgtttgggcatcacctgccattctcctgccatcctctcaacagctctgtggggtgggtcctcccccatacctgatgcaccgaccacacagtggaaagtgacaaagccagcgccttgccccaggccccgcagggtggagcccgtctgctcagggttgcaggcccagattctccactgctaccgagatcgcccgcatgaggtgctgctgtgctcggacctggtcaaggcataccagcgctgcgtgagcgccscccacaagggctgaggagcagacatcattccctgccctggcagtgacttggagccctgaagaagggaccaatcatgggaccacagccactgtgccctgccgtttcctgctgggcccctgcatatgcccctgagcctggggctgccacgtgtttaggaaacaaagtatgcgctactgtctgaaaacaaataaagcagatgcctttgttttcaaaaaaaaaaaaaaaaaaaaaaaaaaaaaaaaaaaaaaaaaaaaaag

SEQ ID NO: 276 - DNA, 1381 bp, Homo sapiens
  misc_feature (1348): n equals a,t,g, or c
  misc_feature (1349): n equals a,t,g, or c
  misc_feature (1350): n equals a,t,g, or c
  misc_feature (1358): n equals a,t,g, or c
  misc_feature (1359): n equals a,t,g, or c
tccgtggtgtggttgactctgaggatctgcccctgaacatctcccgagaaatgctccagcagagcaaaatcttgaaagtcattcgcaaaaacattgttaagaagtgccttgagctcttctctgagctggcagaagacaaggagaattacaagaaattctatgaggcattctctaaaaatctcaagcttggaatccacgaagactccactaaccgccgccgcctgtctgagctgctgcgctatcatacctcccagtctggagatgagatgacatctctgtcagagtatgtttctcgcatgaaggagacacagaagtccatctattacatcactggtgagagcaaagagcaggtggccaactcagcttttgtggagcgagtgcggaaacggggcttcgaggtggtatatatgaccgagcccattgacgagtactgtgtgcagcagctcaaggaatttgatgggaagagcctggtctcagttaccaaggagggtctggagctgcctgaggatgaggaggagaagaagaagatggaagagagcaaggcaaagtttgagaacctctgcaagctcatgaaagaaatcttagataagaaggttgagaaggtgacaatctccaatagacttgtgtcttcaccttgctgcattgtgaccagcacctacggctggacagccaatatggagcggatcatgaaagcccaggcacttcgggacaactccaccatgggctatatgatggccaaaaagcacctggagatcaaccctgaccaccccattgtggagacgctgcggcagaaggctgaggccgacaagaatgataaggcagttaaggacctggtggtgctgctgtttgaaaccgccctgctatcttctggcttttcccttgaggatccccagacccactccaaccgcatctatcgcatgatcaagctaggtctaggtattgatgaagatgaagtggcagcagaggaacccaatgctgcagttcctgatgagatcccccctctcgagggcgatgaggatgcgtctcgcatggaagaagtcgattaggttaggagttcatagttggaaaacttgtgcccttgtatagtgtccccatgggctcccactgcagcctcgagtgcccctgtcccacctggctccccctgctggtgtctagtgtttttttccctctcctgtccttgtgttgaaggcagtaaactaagggtgtcaagccccattccctctctactcttgacagcaggattggatgttgtgtattgtggtttattttattttcttcattttgttctgaaattaaagtatgcaaaataaagaatatgccgtttttatacaaaaaaaaaaaaaaaaannngggggggnngccccggtcccmatttcccccc

SEQ ID NO: 277 - DNA, 1149 bp, Homo sapiens
  misc_feature (680): n equals a,t,g, or c
  misc_feature (1088): n equals a,t,g, or c
  misc_feature (1098): n equals a,t,g, or c
  misc_feature (1140): n equals a,t,g, or c
tcccgggggggatttttttttttttttttttttttttttttgcttaaaaaaaagccatgacggctctcccacaattcatcttccctgcgccatctttgtattatttctaatttattttggatgtcaaaaggcactgatgaagatattttctctggagtctccttctttctaacccggctctcccgatgtgaaccgagccgtcgtccgcccgccgccgccgccgccgccgccgccgcccgccccgcagcccaccatgtctcgccgcaagcaaggcaaaccccagcacttaagcaaacgggaattctcgcccgagcctcttgaagccattcttacagatgatgaaccagaccacggcccgttgggagctccagaaggggatcatgacctcctcacctgtgggcagtgccagatgaacttcccattgggggacattcttatttttatcgagcacaaacggaaacaatgcaatggcagcctctgcttagaaaaagctgtggataagccaccttccccttcaccaatcgagatgaaaaaagcatccaatcccgtggaggttggcatccaggtcacgccagaggatgacgattgtttatcaacgtcatctagaggaatttgccccaaacaggaacacatagcagataaacttctgcactggaggggcctctcctcccctcgttctngcacatggagctctaatccccacgcctgggatgagtgcagaatatgccccgcaggtatttgtaaagatgagcccagcagctacacatgtacaacttgcaaacagccattcaccagtgcatggtttctcttgcaacacgcacagaacactcatggattaagaatctacttagaaagcgaacacggaagtcccctgaccccgcgggttggtatcccttcaggactaggtgcagaatgtccttcccagccacctctccatgggattcatattgcagacaataacccctttaacctgctaagaataccaggatcagtatcgagagaggcttccggcctgggcagaagggcgctttccacccactccccccctgtttagtccaccaccgagacatcattgggacccccaccgnatagagcgcntggggggcggtaaggagatgggcctggggcaaacccttcaanccgagttgc

SEQ ID NO: 278 - DNA, 811 bp, Homo sapiens
ggagaccagagtgggaggaaggcggggagtccaggttccgccccggagccgacttcctcctggtcggcggctgcagcggggtgagcggcggcagcggccggggatcctggagccatggggcgcgcgcgcgacgccatcctggatgcgctggagaacctgaccgccgaggagctcaagaagttcaagctgaagctgctgtcggtgccgctgcgcgagggctacgggcgcatcccgcggggcgcgctgctgtccatggacgccttggacctcaccgacaagctggtcagcttctacctggagacctacggcgccgagctcaccgctaacgtgctgcgcgacatgggcctgcaggagatggccgggcagctgcaggcggccacgcaccagggctctggagccgcgccagctgggatccaggcccctcctcagtcggcagccaagccaggcctgcactttatagaccagcaccgggctgcgcttatcgcgagggtcacaaacgttgagtggctgctggatgctctgtacgggaaggtcctgacggatgagcagtaccaggcagtgcggccgagcccaccaacccaagcaagatgcggaagctcttcagtttcacaccagcctggaactggacctgcaaggacttgctcctccaggccctaagggagtcccagtcctacctggtggaggacctggagcgagctgaggctccttcccagcaacactccggtcasccctggcaatcccaccaaatcatcctgaatctgatctttttatacacaatatacgaaaagccagcttgaaaaaaaaaaaaaaa

SEQ ID NO: 279 - DNA, 1260 bp, Homo sapiens
  misc_feature (1249): n equals a,t,g, or c
  misc_feature (1252): n equals a,t,g, or c
ggtcggcgacagggagggaggaagcctaggagtccgccgcgggacggaggcctgggggaactgggagttcagctttctgcagagggccactaggaacctcggattgcccacggaagccagccactttytttgacagtccagcccacctcctcttctgcccggagaagctccaggggytgcctttktgatcacagcatcttcacaaggaccaaaggaaaataagatttctygtaagaacaccgtgaccacatctttaaaatgacccatttcgtggctyccacaagatttacacctycacactgaggccggaagtggttttgcccctataaaacatggcgaaaagctttcttgtctccaaggaaacgccacgtaatgagtcaaagctgtggcgcacgcgcagaagtacaagctaccggaagtgatggcgcccctactaaagccttggggttagtacgcgtcgcagcagtctcttccgacagttgtgttgtgccaatggtggagaagaaaacttcggttcgctcccaggaccccgggcagcggcgggtgctggaccgggctgcccggcagcgtcgcatcaaccggcagctggaggccctggagaatgacaacttccaggatgacccccacgcgggactccctcagctcggcaagagactgcctcagtttgatgacgatgcggacactggaaagaaaaagaagaaaacccgaggtgatcattttaaacttcgcttccgaaaaaactttcaggccctgttggaggagcagaacttgagtgtggccgagggccctaactacctgacggcctgtgcgggacccccatcgcggccccagcgccccttctgtgctgtctgtggcttcccatccccctacacctgtgtcagctgcggtgcccggtactgcactgtgcgctgtctggggacccaccaggagaccaggtgtctgaagtggactgtgtgagcctgggcattcccagagaggaagggccgctgtgcactgcccggccttcagaaagacagaatttcatcacccaatgcagggggagctcttcctggaccaagggaggagccgctcattcacccaacaaaactgtgtcttatctgccaggaaagaccagcctcactcctgggaactgtctggcaggtaggctgggccccccagtgctgttagaataaaaagcctcgtgccggaaaaaaaaaaaraaaaaaaaaaaaaaaaaaaaaaaaaaaaaaaaaaaaaaaaaaaaaaaaanttngggggggg

SEQ ID NO: 280 - DNA, 1668 bp, Homo sapiens
gggaactgccaaaagtgtgcatttggctacagtggactcgactgtaaggacaaatttcagctgatcctcactattgtgggcaccatcgctggcattgtcattctcagcatgataattgcattgattgtsacagcaagatcaaataacaaaacgaagcatattgaagaagagaacttgattgacgaagactttcaaaatctaaaactgcggtcgacaggcttcaccaatcttggagcagaagggagcgtctttcctaaggtcaggataacggcctccagagacagccagatgcaaaatccctattcaagccacagcagcatgccccgccctgactattagaatcataagaatgtggaacccgccatggcccccaaccaatgtacaagctattatttagagtgtttagaaagactgatggagaagtgagcaccagtaaagatctggcctccggggtttttcttccatctgacatctgccagcctctctgaatggaagttgtgaatgtttgcaacgaatccagctcacttgctaaataagaatctatgacattaaatgtagtagatgctattagcgcttgtcagagaggtggttttcttcaatcagtacaaagtactgagacaatggttagggttgttttcttaattcttttcctggtagggcaacaagaaccatttccaatctagaggaaagctccccagcattgcttgctcctgggcaaacattgctcttgagttaagtgacctaattcccctgggagacatacgcatcaactgtggaggtccgaggggatgagaagggatacccaccacctttcaagggtcacaagctcactctctgacaagtcagaatagggacactgcttctatccctccaatggagagattctggcaacctttgaacagcccagagcttgcaacctagcctcacccaagaagactggaaagagacatatctctcagctttttcaggaggcgtgcctgggaatccaggaactttttgatgctaattagaaggcctggactaaaaatgtccactatggggtgcactctacagtttttgaaatgctaggaggcagaaggggcagagagtaaaaaacatgacctggtagaaggaagagaggcaaaggaaactgggtggggaggatcaattagagaggaggcacctgggatccaccttcttccttaggtcccctcctccatcagcaaaggagcacttctctaatcatgccctcccgaagactggctgggagaaggtttaaaaacaaaaaatccaggagtaagagccttaggtcagtttgaaattggagacaaactgtctggcaaagggtgcgagagggagcttgtgctcaggagtccagccgtccagcctcggggtgtaggtttctgaggtgtgccattggggcctcagccttctctggtgacagaggctcagctgtggccaccaacacacaaccacacacacacaaccacacacacaaatgggggcaaccacatccagtacaagcttttacaaatgttattagtgtccttttttatttctaatgccttgtcctcttaaaagttattttatttgttattattatttgttcttgactgttaattgtgaatggtaatgcaataaagtgcctttgttagatggaaaaaaaaaaaaaaaaaaaaaaaaaaaaaa

SEQ ID NO: 281 - DNA, 2328 bp, Homo sapiens
ggaaagttggtgtgtggcatggtgtcctatttgaacgacctgcccagtcagcgcatccagccacagcaggtagcagtctggccaaccatggtggatatcaacagccccgaaagcctaaccgaagcatataaactccgtgcagccagattagtagaaattgctgcaaaaaaccttcaaaaagaagtgattcacagaaaaagcaaggaggtagcttggaacctaacttctgttgaccttgttcgagcaagtgaggcacattgccactatgtggtagttaagctcttttcagaaaaactcctcaaaattcaagataaagccattcaagctgtcttaaggagtttatgtctgctgtattctctgtatggaatcagtcagaacgcgggggatttccttcaggggagcatcatgacagagcctcagattacacaagtaaaccagcgtgtaaaggagttactcactctgattcgctcagatgctgttgctttggttgatgcatttgattttcaggatgtgacacttggctctgtgcttggccgctatgatgggaatgtgtatgaaaacttgtttgagtgggctaagaactccccactgaacaaagcagaggtccacgaatcttacaagcacctgaagtcactgcagtccaagctctgaagtgtcacaaggacaagtttaatctgcttcagaaagcgcctgtgtgcaactcaaattttgtggaatctttttcgaattcaaatagctatagagcaaatgataaattgacccctttttataaatggagggaaaaaatgaacagatttcagagattaaatgaaaaaaagcagatgttttaagtgcaattaacactgaaagagacctgttaaaccattcagaaaaagcttaagaaatgcgatatgacttccttttgtaatgctgctgatcccagtagactatgacttttgataattagcagaatttaactactgagtagttgattattttcacattttaattgctaatcactggctatataagtgtttttaagcaaaggtatttttgaagtggtgtagaacccttccaagctttcctgctcagtgttctaccagacttaccctggggcctggcttaaaagcaggattgaagaaaagggactgggggaaggaaacttattggaaaacttgatgcgaatgagtttctgcttggcacagtctctgcctgcttgctctcctttgctgatggattgcatttatcaaactattcatgctagcatttttccaacgagggaacttattccgcacgggcctactgtaggaccattgtctcgtgtaattaggaattttccatttgaaggatygctaaattgtcacagtagtaggaagtatagggaaacctctcagctgtggcactgttgtagctttggagtgcagagtgtaactctgggacaatcagatttcacatattctgtcatcttggcataagccattaaaagcttggagattactgtatttggcattaaaaaaaaatgtcacttaggtcagcactcccagacgtagcacagaaaaaccctttgacacaaaccatgtgttctgatttttggttcagaaaatattgaaactgtgagttgttttttttttaacaactgggaaaaaacaaaaacaaaaaactatagttagaaaaatggaagttccataggttctatttcttactctatgtatggctttgttttcagtctatttctaggagctttctctgaatcgctaattgtcctttcagttgaaatctaatttatacaatcattctatacttaaaggttaaatacatcttaattaattttttcttaaagtcaatgtaagtcactttgttttgtttttttttaatctacgccatatgcctcatgaaaccagctgttctagaatcagtcctgagaatatggcttaattccatggaaacataactcctatcttgggacctgacataatatctatctatcctggggaactggtaatatgagacttataggttacagcagaaatgctacatgttgacaaaagccttaatcgttccactgggagaactaattgataattgtgttaagattgaagattaaccctgtgttaatctcacttgagtctatcctgacagtagttcagattctggaaaatgataaactgacctgctagatgtagaattgtttcaaaattagtgttgaaataccttgttcacagatgaatatctgggcaggatctgagggtgtttggaatgacaccccccaatccagttgcatagatgggatgtctttgcaggtttgaggagatcatcgacctgcagagccccctttgacccagtacctca

SEQ ID NO: 282 - DNA, 956 bp, Homo sapiens
ggccgagcccgcgccccccagaccccgagagctcgcagctccggcccggcggcgatggcgcggagctgcgcgtgctggtggacatggacggcgtcctggccgacttcgaggccggcctcctgcggggcttccgccgccgcttccctgaggagccgcacgtgccgctggagcarcgccgcggcttcctggcccgcgagcagtaccgcgccctgcggcccgacctggcggataaagtggccagtgtgtacgaagccccgggctttttcctggacctggagcccatcccgggagccttggacgctgtgcgggagatgaacgacctaccggacacgcaggtcttcatctgcaccagccccctgctgaagtaccaccactgtgtgggtgagaagtaccgctgggtggagcagcacctggggccccagttcgtagaacgaattatcctgacaagggacaagacggtggtcttgggggacctgctcattgatgacaaggacacagttcgaggccaggaggagaccccaagctgggagcacatcttgttcacctgctgccacaatcggcacctggtcctgcccccgacaaggagacggctgctctcctggagtgacaactggagggagatcttagatagcaagcgcggagctgcgcagcgggaatgagcggggatgccgcgggcagcagctggagctaaaggaagggcaggcccacaggggccaccgcagagccgagtcggggcggcatcgtgctggtgcctctggccccgtggagtggagcaggcagataccgttaagcgctgtgctaccggccccaggcccagccacccggtacctcccgagaggctgtccctggaccctggctggcatggaaatacagtgggaaaaccagtcgggacctttaataaaagaccttggctttctaaaaaaaaaaaaaaaaaaaaaaaaaaaaaaaaaaaaaat

SEQ ID NO: 283 - DNA, 1402 bp, Homo sapiens
  misc_feature (26): n equals a,t,g, or c
  misc_feature (88): n equals a,t,g, or c
  misc_feature (97): n equals a,t,g, or c
  misc_feature (131): n equals a,t,g, or c
  misc_feature (1344): n equals a,t,g, or c
  misc_feature (1355): n equals a,t,g, or c
  misc_feature (1394): n equals a,t,g, or c
ccccccgccccccgcacccccgaaanccagtgaaggtgaagactccgcggcccgcgggcgtgccaggagagcggactgtttgatgtgntgccggggnccgtgcaggggcgagtggtttcgggcgggggggnagaaaagatttttttcttctcttaatcggaatcgtgatggtgttggattatttcaatggtggggttaatatagcatgttatcctgtctatcttttaaagatttctgtataagactgttgagcagtttttaaaatagtgtaggataatataaaaagcagatagatggcgctatgtttgattcctacaacgaaattatcaccagctttttttcattcttaactctttaaaggattcaaacgcaactcaaatctgtgctggactttaaaaaaacaattcaggaccaaattttttctcagtgtgtgtgtttattccttataggtgtaaatgagaagacgtgtttttttccttcaccgatgctccatcctcgtatttctttttccttgtaaatgtaatcagatgccattttatatgtggacgtatttatactggccaaacatattttttcttttgtccctttttttctttcctttctttttacttcctttatttctttattccttccttttcctttttttcttttttttttcttttttttttggtagttgttgttacccacgccattttacgtctccttcactgaagggctagagttttaacttttaattttttatatttaaatgtagacttttgacacttttaaaaaacaaaaaaagacaagagagatgaaaacgtttgattattttctcagtgtatttttgtaaaaaatatataaagggggtgttaatcggtgtaaatcgctgtttggatttcctgattttataacagggcggctggttaatatctcacacagtttaaaaaatcagcccctaatttctccatgtttacacttcaatctgcaggcttcttaaagtgacagtatcccttaacctgccaccagtgtccaccctccggcccccgtcttgtaaaaaggggaggagaattagccaaacactgtaagcttttaagaaaaacaaagttttaaacgaaatactgctctgtccagaggctttaaaactggtgcaattacagcaaaaagggattctgtagctttaacttgtaaaccacatcttttttgcactttttttataagcaaaaacgtgccgtttaaaccactggatctatctaaatgccgatttgagttcgcgacactatgtactgcgtttttcattcttgkatttgactatttaatcctttctacttgtcgctaaatataaatggtttaaggcctaatggntgsatgatagncatawggkgtcaggtttataactttgggttaaaaattgnaaaagggg

SEQ ID NO: 284 - DNA, 675 bp, Homo sapiens
  misc_feature (20): n equals a,t,g, or c
  misc_feature (520): n equals a,t,g, or c
  misc_feature (560): n equals a,t,g, or c
  misc_feature (618): n equals a,t,g, or c
accccctttaggaaaaaagntggagctccaccgcggtggcggccgctctagactcgaggaattccagatgcgagcgcggccgcggccccggccgctctgggcgactgtgctggcgctgggggcgctggcgggcgttggcgtaggagggcccaacatctgtaccacgcgaggtgtgagctcctgccagcagtgcctggctgtgagccccatgtgtgcctggtgctctgatgaggccctgcctctgggctcacctcgctgtgacctgaaggagaatctgctgaaggataactgtgccccagaatccatcgagttcccagtgagtgaggcccgagtactagaggacaggcccctcagcgacaagggctctggagacagctcccaggtcactcaagtcagtccccagaggattgcactccggctccggccagatgattcgaagaatttctccatccaagtgcggcaggtggargattaccctgtggacatctactacttgatggacctgtcttactccatgaanggatgatctgtggarcatccagaacctgggtaccaagctnggccacccaratgcgaaagctcaccartaacctgcggattggcttcsgggcatttgtnggacaagcctgtgtcaccatacatgtacctcgtgcgaattttggctcagggcaaatt

SEQ ID NO: 285 - DNA, 1339 bp, Homo sapiens
  misc_feature (1330): n equals a,t,g, or c
  misc_feature (1331): n equals a,t,g, or c
gccgcaacctttccaagggagtggttgtgtgatcgccatcttagggaaaagatgttctcgtccgtggcgcacctggcgcgggcgaaccccttcaacacgccacatctgcagctggtgcacgatggtctcggggacctccgccgccgtggaagagtacagttgtgaatttggctccgcgaagtattatgcactgtgtggctttggtggggtcttaagttgtggtctgacacacactgctgtggttcccctggatttagtgaaatgccgtatgcaggtggacccccaaaagtacaagggcatatttaacggattctcagttacacttaaagaggatggtgttcgtggtttggctaaaggatgggctccgactttccttggctactccatgcagggactctgcaagtttggcttttatgaagtctttaaagtcttgtatagcaatatgcttggagaggagaatacttatctctggcgcacatcactatatttggctgcctctgccagtgctgaattctttgctgacattgccctggctcctatggaagctgctaaggttcgaattcaaacccagccaggttatgccaacactttgagggatgcagctcccaaaatgtataaggaagaaggcctaaaagcattctacaagggggttgctcctctctggatgagacagataccatacaccatgatgaagttcgcctgctttgaacgtactgttgaagcactgtacaagtttgtggttcctaagccccgcagtgaatgttcaaagccagagcagctggttgtaacatttgtagcaggttacatagctggagtcttttgtgcaattgtttctcaccctgctgattctgtggtatctgtgttgaataaagaaaaaggtagcagtgcttctctggtcctcaagagacttggatttaaaggtgtatggaagggactgtttgcccgtatcatcatgattggtaccctgactgcactacagtggtttatctatgactccgtgaaggtctacttcagacttcctcgccctcctccacccgagatgccagagtctctgaagaagaagcttgggttaactcagtagttagatcaaagcaaatgtggactgaatctgcttgttgatcagtgttgaagaaagtgcaaaaggaacttttatatatttgacagtgtaggaaattgtctattcctgatataattactgtagtactcttgcttaaggcaagagtttcagatttactgttgaaataaacccaactcttcatgaaaaaaaaaaaaaaaaaaaaaaaaaaaaaaaaaaaaaaaaaaaaaaaaaaaaaaaaaaaaaaaaaaaaannaaaaaaaa

SEQ ID NO: 286 - DNA, 1398 bp, Homo sapiens
ctctggagccaccagcagaacctcttcaatatcttgcatgttacagatttcactgctcccaccagcttggagacaacatgtggttcttgacaactctgctcctttgggttccagttgatgggcaagtggacaccacaaaggcagtgatcactttgcagcctccatgggtcagcgtgttccaagaggaaaccgtaaccttgcactgtgaggtgctccatctgcctgggagcagctcyacacagtggtttctcaatggcacagccactcagacctcgacccccagctacagaatcacctctgccagtgtcaatgacagtggtgaatacaggtgccagagaggtctctcagggcgaagtgaccccatacagctggaaatccacagaggctggctactactgcaggtctccagcagagtcttcacggaaggagaacctctggccttgaggtgtcatgcgtggaaggataagctggtgtacaatgtgctttactatcgaaatggcaaagcctttaagtttttccactggaattctaacctcaccattctgaaaaccaacataagtcacaatggcacctaccattgctcaggcatgggaaagcatcgctacacatcagcaggaatatcwrtcactgtgaaagagctatttccagctccagtgctgaatgcatctgtgacatccccactcctggaggggaatctggtcaccctgagctgtgaaacaaagttgctcttgcagaggcctggtttgcagctttacttctccttctacatgggcagcaagaccctgcgaggcaggaacacatcctctgaataccaaatactaactgctagaagagaagactctgggttatactggtgcgaggctgccacagaggatggaaatgtccttaagcgcagccctgagttggagcttcaagtgcttggcctccagttaccaactcctgtctggtttcatgtccttttctatctggcagtgggaataatgtttttagtgaacactgttctctgggtgacaatacgtaaagaactgaaaagaaagaaaaagtggratttagaaatctctttggattctggtcatgagaagaaggtaatttccagccttcaagaagacagacatttagaagaagagctgaaatgtcaggaacaaaaagaagaacagctgcaggaaggggtgcaccggaaggagccccagggggccacgtagcagcggctcagtgggtggccatcgatctggaccgtcccctgcccacttgctccccgtgagcactgcgtacaaacatccaaaagttcaacaacaccagaactgtgtgtctcatggtatgtaactcttaaagcaaataaatgaactgacttcaactgaaaaaaaaaaaaaaaaaaaaaaaaaaaaaaaaaaaaaaaaa

SEQ ID NO: 287 - DNA, 926 bp, Homo sapiens
  misc_feature (20): n equals a,t,g, or c
  misc_feature (22): n equals a,t,g, or c
  misc_feature (896): n equals a,t,g, or c
  misc_feature (917): n equals a,t,g, or c
gaaatcctttttatctttcntnttttttttaagggcctttctaactccgctgccgccatggctcctgtgaaaaagcttgtggtgaaggggggcaaaaaaaagaagcaagttctgaagttcactcttgattgcacccaccctgtagaagatggaatcatggatgctgccaattttgagcagtttttgcaagaaaggatcaaagtgaacggaaaagctgggaaccttggtggaggggtggtgaccatcgaaaggagcaagagcaagatcaccgtgacatccgaggtgcctttctccaaaaggtatttgaaatatctcaccaaaaaatatttgaagaagaataatctacgtgactggttgcgcgtagttgctaacagcaaagagagttacgaattacgttacttccagattaaccaggacgaagaagaggaggaagacgaggattaaatttcatttatctggaaaattttgtatgagttcttgaataaaacttgggaaccaaaatggtggtttatccttgtatctctgcagtgtggattgaacagaaaattggaaatcatagtcaaagggcttcccttggttcgccactcatttatttgtaacttgacttctttttttttctgcttaaaaatttcaattctcgtggtaataccagagtagaaggagagggtgactttaccgaactgacagccattggggaggcagatgcgggtgtggaggtgtgggctgaaggtagtgactgtttgattttaaaaagtgtgactgtcagttgtatctgttgcttttctcaatgattcagggatacaaatgggcttctctcattcattaaaagaaaacgcgacatctttctaagattctctgtgggaaaatgactgtcaataaaatgcgggtttctgggncaaaaaaaaaaaaaaaaaccncggggagtc

SEQ ID NO: 288 - DNA, 3094 bp, Homo sapiens
agagagctcagatggcccttttaagggggctccaagaaccaacatcactgctcttttagataaacctctgccctccactccttgcttgagtgggttaaaggaactaacagttgtccctttaggaggacaaaatggggtcaagaggacacagaagagttgtatagcaccagattggttccaaatagttaatggatgtgtgcacattttctgttcagggattaagaccagaatatcagtggatttgttttccccaccaagtggcctcttagactagtcattaacttatgattagctctaaagatttcaaatagtggcagacagtgtcttctgaatgtaagttttgagaaatacgagtctgtcagagcggccataagccataaagagtcaatctcttaattatatttttcatcatgtaaacaagtttcccatttccctttcttagattgcaccagtgaaggagatgttttgcaaagattcagagaactaatttttcactggataagacctgagtaacccagaccccccaccgtggttcttttcacagccctcgactttgcacttaaaaagggatattgtaaatgaaaggctgcagtgccagttttaagaaagaatttctgtgaagtgtgaggactctggagtctagctcacataaagagagtgttatataaaaatccgacagctgaactaggttgctcttttttggcagggagtggggatgagatttgacaccaatatgggcaaaattagataaccttttggttaatataaatgattttgatttggaggcctaatttgtagattgtgaaagcagcttttagtttaacttattcacagaccccttataattaccatgttttttttttcttcctaaatctcttggttcagcttgtgaatcttacgtgcccgtaaagttgggatgttgaattggctcttctttgttctggcagtgagtcaagtgtccagcattttttcataagtgttttttaaaattgttctccagcattttatggctcctccctcccatgtcctcagacccagcaaaagcgtagaggcagaattagaggcctctccaggccagctcctctgcccacatgtcatacaaggtgtgaatttgagcacagtccagaaatggagacatcccacccccagttgaataatggcccattcatgccaaccttgccaacacggagagggcagagatgcactagaagaccttcatcctccccttcctctgccccaagtcactacagttggttctattgaagccagtctttaagaaacctgggttaaagacaccagcacttctgcttgctgggctggctggacctgtgaagcmatgggcaggtagtgcctcttgagagtcattttatttggccaccttcaggtgagactatccatagacacatgctaggataggccccgctgggagggcagttacaggagagagtaggtggtggtgacgtgagggctgtgaaggatccagagacaagacttagatgtttcgttcattcactcactcattcagttactcctaagacttttcagtttcataaggaagagtgttgcctgaggccctagggaatattggggaatagaagggattgaggaaacattaataatagttattcaaaagacccaaatgcttatacttctctctcccttcttctctctctgacacacacacacacacacacacacacacacacacacgtgcacattcctcccttacatgctcatttgtgccttaaatgtgccttataggtaaatccaggatgactgaggaatccctcgtcactgggagattttgtatatattcttttattattagattgagttgggtgtggggaaaaatttttttctgaaggctcaaaagtggtttcctaaaagtgagccactatcagatttgcacatcaggagaaaagaaatagggttacgtccattaggaaaatcccagtttgcaggagtgcaatcacatcaaaaaaacaaccagccaggattaaaggtattataaatcctcatagcggaacatttctcagggcaaaggaacctggctcatttgaagattaatgttccatgcctttgtggtcaaasggtcagcacttaacacaggaaaaaactaggtgttgttttgttttgttattttggacaacataaaattcaggaatgttttatttagccttggtttctagaaggaagggaaataatatttcttgagcatttactagggtgttgcgtgctgtgctaagtaaattttaagtctttcagttttatagatacggaaaacaagggtgactctttaccacaggatgaataaagaactaagtaatatgggaaatgcagcaatttctggactagctgagccgattccttcctgtgagcacactgtaagctttcaagttctctgggcaggaattacagcacctgtcccctgcaatggccctgctgtgtgatgctcatcgcttcccttcgtgctggagcagtcccccaggtgtccatctcctatctttttgttccaatcttctgtgagttccagctagcaggctttacatctggggaaaggaaaaccaggggttttagctctgttctctgctcccatccttcgctcaccagctgagtgagaacatgaactttttgcaccatgtacccatggcttacactacttagaaaatcaccttttcagataaaacagtttatgagttcatagagaacaccagcactctttgacaaaactgtgagtgaccctttttaaacaatgctgagcaggccctgagctataatcaacggtgagctttaatgtctatgctgacagttaggttttgctctcttttgtaacaggttacgtagaccagcagtgtttaaatctaaatacgttgtgagtctgttatctgtcctatcgcgttttttaaatgactttttattctttatcatagctaagtaaataccaaaaaaaaaaaaaagctttgtaggacacttgtacttagtttgggaaaaaaaaataaattgaaattgttatgcttttgtatttccatttcttgcaaataaatattttttcttaaatagtaagatgttgcccagtctttataatcttggtact

SEQ ID NO: 289 - DNA, 1983 bp, Homo sapiens
gacctcagaggagtcaaggccccgcctgtcccagctgtctgtgactgacgtgaccaccagttcactgaggctcaactgggaggccccaccgggggccttcgactccttcctgctccgctttggggttccatcaccaagcactctggagccgcatccgcgtccactgctgcagcgcgagctgatggtgccggggacgcggcactcggccgtgctccgggacctgcgttccgggactctgtacagcctgacactgtatgggctgcgaggaccccacaaggccgacagcatccagggaaccgcccgcaccctcagcccagttctggagagcccccgtgacctccaattcagtgaaatcagggagacctcagccaaggtcaactggatgcccccaccatcccgggcggacagcttcaaagtctcctaccagctggcggacggaggggagcctcagagtgtgcaggtggatggccaggcccggacccagaaactccaggggctgatcccaggcgctcgctatgaggtgaccgtggtctcggtccgaggctttgaggagagtgagcctctcacaggcttcctcaccacggttcctgacggtcccacacagttgcgtgcactgaacttgaccgagggattcgccgtgctgcactggaagcccccccagaatcctgtrgacacctatgacrtccaggtcacagcccctggggccccgcctctgcaggcggagaccccaggcagcgcggtggactaccccctgcatgaccttgtcctccacaccaactacaccgccacagtgcgtggcctgcggggccccaacctcacttccccagccagcatcaccttcaccacagggctagaggcccctcgggacttggaggccaaggaagtgaccccccgcaccgccctgctcacttggactgagcccccagtccggcccgcaggctacctgctcagcttccacacccctggtggacagacccaggagatcctgctcccaggagggatcacatctcaccagctccttggcctctttccctccacctcctacaatgcacggytccaggccatgtggggccagagcctcctgccgcccgtktccacctctttcaccacgggtgggctgcggatccccttccccagggactgcggggaggagatgcagaacggagccggtgcctccaggaccagcaccatcttcctcaacggcaaccgcgagcggcccctgaacgtkttttgcgacatggagactgatgggggcggctggctggtgttccagcgycgcatggatggacagacagacttctggagggactgggaggactatgcccatggttttgggaacatctctggagagttctggctgggcaatgaggccctgcacagcctgacacaggcaggtgactactccatgcgcgtggacctgcgggctggggacgaggctgtgttcgcccagtacgactccttccacgtagactcggctgcggagtactaccgcctccacttggagggctaccacggcaccgcagggactccatgagctaccacagcggcagtgtcttctctgcccgtgatcgggaccccaacagcttgctcatctcctgcgctgtctcctaccgaggggcctggtggtacaggaactgccactacgccaacctcaacgggctctacgggagcacagtggaccatcagggagtgagctggtaccactggaagggcttcgagttctcggtgcccttcacggaaatgaagctgagaccaagaaactttcgctccccagcggggggaggctgagctgctgcccacctctctcgcaccccagtatgactgccgagcactgaggggtcgccccgagagaagagccagggtccttcaccacccagccgctggaggaagccttctctgccagcgatctcgcagcactgtgtttacaggggggaggggaggggttcgtacgggagcaataaaggagaaactgaggtacccgga

SEQ ID NO: 290 - DNA, 1298 bp, Homo sapiens
  misc_feature (1224): n equals a,t,g, or c
  misc_feature (1231): n equals a,t,g, or c
  misc_feature (1242): n equals a,t,g, or c
  misc_feature (1262): n equals a,t,g, or c
  misc_feature (1285): n equals a,t,g, or c
gaaggacagcagaccagacagtcacagcagccttgacaaaacgttcctggaactcaagctcttctccacagaggaggacagagcagacagcagagaccatggagtctccctcggcccctccccacagatggtgcatcccctggcagaggctcctgctcacagcctcacttctaaccttctggaacccgcccaccactgccaagctcactattgaatccacgccgttcaatgtcgcagaggggaaggaggtgcttctacttgtccacaatctgccccagcatctttttggctacagctggtacaaaggtgaaagagtggatggcaaccgtcaaattataggatatgtaataggaactcaacaagctaccccagggcccgcatacagtggtcgagagataatataccccaatgcatccctgctgatccagaacatcatccagaatgacacaggattctacaccctacacgtcataaagtcagatcttgtgaatgaagaagcaactggccagttccgggtatacccggagctgcccaagccctccatctycagcaacaactccaaacccgtggaggacaaggatgctgtggccttcacctgtgaacctgagactcaggacgcaacctacctgtggtgggtaaacaatcagarcctcccggtcagtcccaggctgcagctgtccaatggcaacaggaccctcactctattcaatgtcacaagaaatgacacagcaagctacaaatgtgaaacccagaacccagtgagtgccaggcgcagtgattcagtcatcctgaatgtcctctatggcccggatgcccccaccatttcccctctaaacacatcttacagatcaggggaaaatctgaacctctcctgccacgcagcctctaacccacctgcacagtactcttggtttgtcaatgggactttccagcaatccacccaagagctctttatccccaacatcactgtgaataatagtggatcctatacgtgccaagcccataactcagacactggcctcaataggaccacagtcacgacgatcacagtctatgcagagccacccaaacccttcatcaccagcaacaactccaaccccgtggaggatgaggatgctgtagccttaacctgtgaacctgagattcagaacacaacctacctgtggtgggtaaataatcagagccttccggtcagtcccaggctgcacttgccaatgacaacangaccctnactctactcantggcacaaggaatgatgtangaccctatgaatgtggaatccanaacaaattaagtg

SEQ ID NO: 291 - DNA, 2459 bp, Homo sapiens
  misc_feature (3): n equals a,t,g, or c
  misc_feature (4): n equals a,t,g, or c
  misc_feature (1604): n equals a,t,g, or c
  misc_feature (1605): n equals a,t,g, or c
  misc_feature (2374): n equals a,t,g, or c
  misc_feature (2392): n equals a,t,g, or c
cgnnccacgcgtccgcagcarggccaacagtcacagcagccctgaccagagcattcctggagctcaagctctctacaaagaggtggacagagaagacagcagagaccatgggacccccctcagcccctccctgcagattgcatgtcccctggaaggaggtcctgctcacagcctcacttctaaccttctggaacccacccaccactgccaagctcactattgaatccacgccrttcaatgtcgcagaggggaaggaggttcttctactcgcccacaacctgccccagaatcgtattggttacagctggtacaaaggcgaaagagtggatggcaacagtctaattgtaggatatgtaataggaactcaacaagctaccccagggcccgcatacagtggtcgagagacaatataccccaatgyatccctgctgatccagaacgtcacccagaatgacacaggattctataccctacaagtcataaagtcagatcttgtgaatgaagaagcaaccggacagttccatgtatacccggagctgcccaagccctccatctccarcaacaactccaaccccgtggaggrcaaggatgctgtrgccttcacctgtgaacctgaggttcagaacacaacctacctgtggtgggtaaatggtcagagcctcccggtcagtcccaggctgcagctgtccaatggcaacatgaccctcactctactcagcgtcaaaaggaacgatgcaggatcctatgaatgtgaaatacagaacccagcgagtgccaaccgcagtgacccagtcaccctgaatgtcctctatggcccagatggccccaccatttccccctcaaaggccaattaccgtccaggggaaaatctgaacctctcctgccacgcagcctctaacccacctgcacagtactcttggtttrtcaatgggackttccagcaatccacmcaagagctctttatccccaacatcactgtgaataatagtggatcctatacgtgccaagcccataactcagacactggcctcaataggaccacagtcacgacgatcacagtctatgcagagccacccaaacccttcatcaccagcaacaactccaaccccgtggaggatgaggatgctgtagccttaacctgtgaacctgagattcagaacacaacctacctgtggtgggtaaataatcagagcctcccggtcagtcccaggctgcagctgtccaatgacaacaggaccctcactctactcagtgtcacaaggaatgatgtaggaccctatgagtgtggaatccagaacgaattaagtgttgaccacagcgacccagtcatcctgaatgtcctctatggcccagacgaccccaccatttccccctcatacacctattaccgtccaggggtgaacctcagcctctcctgccatgcagcctctaacccacctgcacagtattcttggctgattgatgggaacatccagcaacacacacaagagctctttatctccaacatcactgagaagaacagcggactctatacctgccaggccaataactcagccagtggccacagcaggactacagtcaagacaatcacagtctctgcgganntgcccaagccctccatctccagcaacaactccaaacccgtggaggacaaggatgctgtggccttcacctgtgaacctgaggctcagaacacaacctacctgtggtgggtaaatggtcagagcctcccagtcagtcccaggctgcagctgtccaatggcaacaggaccctcactctattcaatgtcacaagaaatgacgcaagagcctatgtatgtggaatccagaactcagtgagtgcaaaccgcagtgacccagtcaccctggatgtcctctatgggccggacacccccatcatttcccccccagactcgtcttacctttcgggagcgaacctcaacctctcctgccactcggcctctaacccatccccgcagtattcttggcgtatcaatgggataccgcagcaacacacacaagttctctttatcgccaaaatcacgccaaataataacgggacctatgcctgttttgtctctaacttggctactggccgcaataattccatagtcaagagcatcacagtctctgcatctggaacttctcctggtctctcagctggggccactgtcggcatcatgattggagtgctggttggggttgctctgatatagcagccctggtgtagtttcttcatttcaggaagactgacagttgttttgcttcttccttaaagcatttgcaacagctacagtctaaaattgcttctttaccaaggatatttacagaaaagactctgaccagagaatcgagaaccatcctagccaacatngtgaaaaccccatctgtnactaaaaatacaaaaatgagctgggctttgtggcgcgcacctgttagtccccgttaatttggggagg

SEQ ID NO: 292 - DNA, 570 bp, Homo sapiens
  misc_feature (567): n equals a,t,g, or c
aattcggcacgmgccggagtgtggtacttctcctagttgcagtcaggcttcatacgctattgtcctgcccgttagagcagccagcgggtacagaatggattttggaagagggagtcaccactggacctccaaggaagccacgtgcagacatctacaaccttcgatctcctgacgagtttattgttggccaaaaccaggctttgattgaaccaggatgaatgcgggtgttggaagtagaatatatatatacatataaaattggttgggagccacgtgtaccagtgtgtgttgatcttggcttgattcagtctgccttgtaacagaaactggcgatggaatatgagaggagccctctggaaagaaaaggacagaccctgtgctttcatgaaagtgaagatctggctgaaccagttccacaaggttactgtatacatagcctgagtttaaaaggctgtgcccacttcaagaatgtcattgttagactttgaaatttctaactgcctacctgcataaagaaaataaaatcttttaaatcaaaaaaaaaaaaaaaraagggggccgctctanagg

SEQ ID NO: 293 - DNA, 2468 bp, Homo sapiens
  misc_feature (2076): n equals a,t,g, or c
gggtttgagaagattggacagtgcttcaggcaccgtgtacacagcaatggatgtggccacaggacaggaggtggccattaagcagatgaatcttcagcagcagcccaagaaagagctgattattaatgagatcctggtcatgagggaaaacaagaacccaaacattgtgaattacttggacagttacctcgtgggagatgagctgtgggttgttatggaatacttggctggaggctccttgacagatgtggtgacagaaacttgcatggatgaaggccaaattgcagctgtgtgccgtgagtktctgcaggctctggagttcttgcattcgaaccagataaccccagagcagagcaaacggagcaccatggtaggaaccccatactggatggcaccagaggttgtgacacgaaaggcctatgggcccaaggttgacatctggtccctgggcatcatggccatcgaaatgattgaaggggagcctccatacctcaatgaaaaccctctgagagccttgtacctcattgccaccaatgggaccccagaacttcagaacccagagaagctgtcagctatcttccgggactttctgaaccgctgtctcgagatggatgtggagaagagaggttcagctaaagagctgctacagcatcaattcctgaagattgccaagcccctctccagcctcactccactgattgctgcagctaaggaggcaacaaagaacaatcactaaaaccacactcaccccagcctcattgtgccaagccttctgtgagataaatgcacatttcagaaattccaactcctgatgccctcttctccttgccttgcttctcccatttcctgatctagcactcctcaagactttgatccttggaaaccgtgtgtccagcattgaagagaactgcaactgaatgactaatcagatgatggccatttctaaataaggaatttcctcccaattcatggatatgagggtggtttatgattaagggtttatataaataaatgtttctagtcttccgtgtgtcaaaatcctcacctccttcataaccatctcccacaattaattcttgactatataaatttatggtttgataatattatcaatttgtaatcaattgagatttctttagtgcttgcttttctgtgactcaactgcccagacacctcattgtacttgaaaactggaacagcttgggaatgccatggggtttgataatctgccagggacatgaagaggctcagcttcctggaccatgactttggctcagctgatcctgacatgggagaacaaccacatttttctttgtgtgtgcttctagcagctgttcgggaggaccttgacccaayagtgttcccatgctgtttcttgtgaaatgctctcggctatgtagcagcttttgattccctgcataccctaggctgctgcccctatcctgtcccttgtttataacattgagaggttttctagggcacatactgagtgagagcagtgttgagaagtcggggaaaatggtgactacttttagagcaaggctgggcatcagcacctgtccagctctacttgtgtgatgtttcaggaactcagcccctttttctgcctaggataaggagctgaaagattaacttggatcttctaatggtccaaatcttttggtcacaataaagagtctccaaattagagactgcatgttagttctggatggatttggtggcctgacatgataccctgccagctgtgaggggaccccgtttttaagatgcatggccaagctctctgcaaatggaaatgcttacactgggtgttggggatgtttgctacctcctgctatttttgtggttttggttctcccactatggtaggacccctggccagcattgtggcttgtcatgtcagccccattgactaccttctcatgctctgaggtactactgcctctgcagcacaaatttctatttctgtcaataaaaggagatgaaaatattctattggagtatgcctttcttttttctcttcgttttttctttccttttctaattttttatatgaaataatgagtaagtttcttnctgaaccatttgagagtggtaagttgcagatagaatgcccctttaccactatatacctgaatgtgtattctttcyttttaacacttttattttaaatataaattaagagaaatgggccaaaaccatttgtattgtttaaagaataattataaacacacttgtatccaccaaatcaagaaakggaacactgacagtaagaaccttctctatcttgtccttcctttctcattatagcccccacctaagaggtaaccaccatcttgacttttatttaaataactttcttgcttttctgtatactttcatcacattcaggtgtgttccaatacaagtagattttagttcggccagtttttgaactttaaataaacatatcataatagataaaaaaa

SEQ ID NO: 294 - DNA, 1080 bp, Homo sapiens
  misc_feature (1038): n equals a,t,g, or c
ctcgtgccgaattcggcacgagcccacgggcccggcgccatgagtgttgccgcttcctggatgacaaccaaatcatcaccagctctggggataccacctgtgccctgtgggacattgagacaggccagcagacagtgggttttgctggacacagtggggatgtgatgtccctgtccctggcccccgatggccgcacgtttgtgtcaggcgcctgtgatgcctctatcaagctgtgggacgtgcgggattccatgtgccgacagaccttcatcggccatgaatccgacatcaatgcagtggctttcttccccaacggctacgccttcaccaccggctctgacgacgccacgtgccgcctcttcgacctgcgggccgatcaggagctcctcatgtactcccatgacaacatcatctgtggcatcacctctgttgccttctcgcgcagcgacggctgctgctcgctggctacgacgacttcaactgcaacatctgggatgccatgaagggcgaccgtgcaggagtcctcgctggccacgacaaccgcgtgagctgcctcggggtcaccgacgatggcatggctgtggccacgggctcctgggactccttcctcaagatctggaactaatggccccacccccactgggcccaggccaggaggggccctgcccatgcccacactacaggccagggctgcggggctggcgcaatcccagcccccttccccgggccacggggccttgggtccctgccctcccacccaggtttggttcctcccggggcccccactgtggagataagaaggggatggaatgggggaagaggaggagcaggaggccctcatccttctgctgccctggggttggggcctcacccctctggagggccggaggcaggaggtggaaaccccaggggctggcttttttaaaactggttttattttaatttttattatattttcagtttttccataaaggagccaattccaactctgwaaaaaaaaaaaaaaaaaaacttcgrgggggggcccgtacccaattngcctttaggggggggtttaaattaatggcggggttttaaaag

SEQ ID NO: 295 - DNA, 2695 bp, Homo sapiens
tcatgattccaagctaaaggaaattaaaaatgtaatttaataatttcctatttttagggttgttaatttttttctacaaaaaaaccttgaaattttagatatcccaatgtgaatctaatttccatatatacagaaattagacaaataataagtctttagttcaacttaagcatatctcaaatgacttctctaaatttaaagttgatcatgataggatcataaaagacagaaaagacttaagtaatcttgtaatgacaattatttccatttttgctgaactaaaaatatttaacttcataaatatgttactacagcttccagatttaaagaaaaaaagtttcccccactctcaattaaaagttagaaccctccacttttaaaattatacaaatatttcttttttacattacacagaagccttctgtaccattttacgaatttctgtcttcataatataagtgaaaatactgtcatttcaattttctgctttaaattgtttttaataagcatyccaaagtgatacagacttaagcttttaatcaatcagtcattcagttgatagacaaagttagcgatgctttatgctaggaaacttgttgacagtaacctgtgcgactttatgcagaagacaaatgctagtaattattatgcacagaggaaaaatcattttaagtatgtggtaaagcagcttcatctttcaaaattgatttgctctggtttttctttagtccattagattccagaatgtccttttactgggaatttagttatgtattaagataacctgttttcagttctttttgaaaagaagacattatttatattgaaccaccttattttaaaatttttaacttttatataccacttgtgtgattccagtgtcatgtcttgggtttgatgtcgttggacagaaaagtgtatcaattattttaaatgaatttttccccatgtttgaggcttagtctgtaaatgtgttgctgtaacagaaaatacttgggtatgcattacttgaatacttgaaaactgaaattaataagatgtattacataatgaattagatttctctgaacagtttttacactgaaaatcttcatttctggattgcagtttgaaatggaatgaagacctgaattatttgggtagaaaaaattatgatagtgcttataagaactgtaaactgttttaaactattttgtgtttgacgcatcaaacttcaagttttttgtaagtttctctcctgaaattttctttctcttctatactttatgcacttactatactactgatgtaataaaagagcagggttaaaaatattgtatctgtattcattgtgaatcctgtagcttttctagttaacaaaaaatcgctttctaaaatactcttaatcccattgttttggttaacatcttacccatttgttgtatttcaaatgccattaatcattttagtacaacacctatgtttataaaaatttgaaaacattacatattgtatttaaaactaattagtgaagagtaagaaaaaaactagccaacagaattgtaggtgatgcattagttaaatttcaaaactcataataaaggaactttcagagattggttgaaacccagtggtatccctgtaaattagctcctgtgactggaaaagaccccaaaaaggcagtagaggagattagtgtttacttgctgtggttgtggtgtgctgctacttaattataggtagtgacacactgaaattcttatttgtccaataatctgaagtagtttcctatatttatctgtactaaattgactataaattgagtctgcaaagaggaaactttttgactgtactgtatttaggagcctttgtacagcttggtcaaatttccatgatatgaagtatttgagttttaaaatatactgttattaaaaggaaaaagacatggccattattccatgtgcttaaatgataatttccttattcagtttcagaagaaaaagaatgaaattgggtaactgtcattgcgttagytttatgttgaattgggaaattgtggcataaagcttaaattcgtgtttatcaaatgtgaaccatagtagtataatgctgctttgtatataatgtaagtgctacaaatagtctcagcactgaaaatgtattgatacctcttaaatgaatgcaacttttgatgtaggtgttttgctatgcctcagaaaatatctgtctgagaatttgttaatctgtttgataatgaagatacttcctgttttcttgtttcatattttcatgttcaaaatttaagttttacatttttactactgttaatttaaataaaatttgttctgtggataaaatgaggttggcagtgaagaaaattaaaaacagcctcattcatgtaactggttaagtaaaaatacattttcactatgtgttcataaacttttaatgaagctgtttgtctttcagttcaaatataagtgatgtttaggctttatttctgttaataaggctttttaccattgattaaatgaaggaatgtatctttttgaagagatttatattctgtaaataaaaattcgttgtaacaataaagttgagttctaactacaaaaaaaaaaaagtcgacaccgccgggaatttaggtgtagtagtcccccgggaaattcggaccggttactgaaggcgatccagttttcccaaagttgggcgtatt

SEQ ID NO: 296 - DNA, 1394 bp, Homo sapiens
  misc_feature (1238): n equals a,t,g, or c
gcccacgcgtccgagctcagtcagcagaagagataaaagcaaacaggtctgggaggcagttctgttgccactctctctcctgtcaatgatggatctcagaaataccccagccaaatctctggacaagttcattgaagactatctcttgccagacacgtgtttccgcatgcaaatcaaccatgccattgacatcatctgtgggttcctgaaggaaaggtgcttccgaggtagctcctaccctgtgtgtgtgtccaaggtggtaaagggtggctcctcaggcaagggcaccaccctcagaggccgatctgacgctgacctggttgtcttcctcagtcctctcaccacttttcaggatcagttaaatcgccggggagagttcatccaggaaattaggagacagctggaagcctgtcaaagagagagagcattttccgtgaagtttgaggtccaggctccacgctggggcaacccccgtgcgctcagcttcgtactgagttcgctccagctcggggagggggtkgagttcgatgtgctgcctgcctttgatgccctggattttgcccgwacaggtcaattgactggcggctataaacctaacccccaaatctatgtcaagctcatcgaggagtgcaccgacctgcagaaagagggcgagttctccacctgcttcacagaactacagagagacttcctgaagcagcgccccaccaagctcaagagcctcatccgcctagtcaagcactggtaccaaaattgtaagaagaagcttgggaagctgccacctcagtatgccctggagctcctgacggtctatgcttgggagcgagggagcatgaaaacacatttcaacacagcccagggatttcggacggtcttggaattagtcataaactaccagcaactctgcatctactggacaaagtattatgactttaaaaaccccattattgaaaagtacctgagaaggcagctcacgaaacccaggcctgtgatcctggacccggcggaccctacaggaaacttgggtggtggagacccaaagggttggaggcagctggcacaagargctgaggcctggctgaattacccatgctttaagaattgggatgggtccccagtgagctcctggattctgctggtgagacctcctgcttcctccctgccattcatccctgcccctctccatgaagcttgagacatatagctggagaccattctttccaaagaacttacctctntcgcaaaggccatttatattcatatagtgacaggctgtgctccatattttacagtcattttggtcacaatcgagggtttctggaattttcacatcccttgtccagaattcattcccctaagagtaataataaataatctctaacaccaaaaaaaaa

SEQ ID NO: 297 - DNA, 998 bp, Homo sapiens
ggcacgaggtgaaataacgggcccatataaatccctctgccgcccgcctgcaagatggattggccgcattgaaattcctccgcragataattaaactcggggcctcatccgggcaaaattacattccttgtgacgactgcgcatgctcggaaaggggacgcaatcragatcccaaacgcggtacagaccaaaccgcagtccacgttacggatcggcttactccgcggagttggcctcatttctgcagtcggcgctccctgtagtttctcctctcgaacgccaggtggagcaaccggccggataccgccacagccctggcaggcggcgctgtgatgcctgagctgatcctctctcctgccacagctcctcaccccctgaaaatgttcgcctgctccaagtttgtctccactccctccttggtcaagagcacctcacagctgctgagccgtccgctatctgcagtggtgctgaaacgaccggagatactgacagatgagagcctcagcagcttggcagtctcatgtccccttacctcacttgtctctagccgcagcttccaaaccagcgccatttcaagggacatcgacacagcagccaagttcattggagctggggctgccacagttggggtggctggttctggggctgggattggaactgtgtttgggagcctcatcattggttatgccaggaacccttctctgaagcaacagctcttctcctacgccattctgggctttgccctctcggaggccatggggctcttttgtctgatggtagcctttctcatcctctttgccatgtgaaggagccgtctccacctcccatagttctcccgcgtctggttggccccgtgtgttccttttcctatacctccccaggcagcctggggaacgtggttggctcagggtttgacagagaaaagacaaataaatactgtattaataagaaaaaaaaaaaaaaaaaaaaaaaaaaaaaaaaaaaaaaaaaaaaaaaaa

SEQ ID NO: 298 - DNA, 1666 bp, Homo sapiens
atccttcactaagcctgctttagtttccaccacctgcttctgcattcttttaatggctccttaggtctccaggaaagctaacagccagggagaggatcagtctcttgctggaccctggcagctttkttgagagcgacatgtttgtggaacacagatgtgcagattttggaatggctgctgataagaataagtttcctggagacagcgtggtcactggacgaggccgaatcaatggaagattggtttatgtcttcagtcaggattttacagtttttggaggcagtctgtcaggagcacatgcccaaaagatctgcaaaatcatggaccaggccataacggtgggggctccagtgattgggctgaatgactctgggggagcacggatccaagaaggagtggagtctttggctggctatgcagacatctttctgaggaatgttacggcatccggagtcatccctcagatttctctgatcatgggcccatgtgctggtggggccgtctactccccagccctaacagacttcacgttcatggtaaaggacacctcctacctgttcatcactggccctgatgttgtgaagtctgtcaccaatgaggatgttacccaggaggagctcggtggtgccaagacccacaccaccatgtcaggtgtggcccacagagcttttgaaaatgatgttgatgccttgtgtaatctccgggatttcttcaactacctgcccctgagcagtcaggacccggctcccgtccgtgagtgccacgatcccagtgaccgtctggttcctgagcttgacacaattgtccctttggaatcaaccaaagcctacaacatggtggacatcatacactctgttgttgatgagcgtgaattttttgagatcatgcccaattatgccaagaacatcattgttggttttgcaagaatgaatgggaggactgttggaattgttggcaaccaacctaaggtggcctcaggatgcttggatattaattcatctgtgaaaggggctcgttttgtcagattctgtgatgcattcaatattccactcatcacttttgttgatgtccctggctttctacctggcacagcacaggaatacgggggcatcatccggcatggtgccaagcttctctacgcatttgctgaggcaactgtacccaaagtcacagtcatcaccaggaaggcctatggaggtgcctatgatgtcatgagctctaagcacctttgtggtgataccaactatgcctggcccaccgcagagattgcagtcatgggagcaaagggcgctgtggagatcatcttcaaagggcatgagaatgtggaagctgctcaggcagagtacatcgagaagtttgccaaccctttccctgcagcagtgcgagggtttgtggatgacatcatccaaccttcttccacacgtgcccgaatctgctgtgacctggatgtcttggccagcaagaaggtacaacgtccttggagaaaacatgcaaatattccattgtaaacaaatcaaaggaaaagaaaccaagaactgaattactgtctgcccattcacatcccattcctgccttttgcaatcatgaaacctgggaatccaaatagttggataacttagaataactaagtttattaaattctagaaagataaaaaaaaaaaaaaaa

SEQ ID NO: 299 - DNA, 2444 bp, Homo sapiens
  misc_feature (4): n equals a,t,g, or c
  misc_feature (402): n equals a,t,g, or c
ctgngtgagctggagcgctatgtcacctcctgtttgcggaagaaaaggaaacctcaagctgagaaagttgatgtgattgccggctcctccaagatgaagggcttctcgtcctcagagtcggagagctccagtgagtccagctcctctgacagcgaagmcwccgaaacaggtcctgcctaatcattggacacggactcttaataaaacggtcttcagttccagattccttcccagcaagctatagcttaagtccattttcttccgtgaaagggacaggactccatcaagttatggaattcctcagagccctgggcctgtcccccggggtggattagtcatgtccagcagcacacgcctagtcccgccttcgggaaggctgcctgcctggccagccgcccaggnctctctgtgtaaagactgcctggctgtcctgcccagccttcctggttctctggggtcctctgggtgggtggcatctcctggagggtgatgacaatccccaacacatgcattcatgtggtgctactctgtgtgcaaagccagaccccaagtatgttttctctctttgtcccatccctctttttctgggactttggaccctaactacttccctcctgaaccttgcagtgacatcagtccaggagagctctcgttcagtgtgcggaagaacactctgacctctagagctgtcctagataaggagtgggagctttagaggcaaggcctctagaccctggaaggctcagtgaggctcttcccacagcatgcttctcactggtgccctgtaaggctcgagccaccgctgactctgagccttttggagtctttcctccttcgtctccattgttcccgtgcatttccaaaagcttaagttgcctggtgggcatttccccagtttctttggcctccgtcttctcaagtcacatagggaaagtacctcctggaaccaggctgcagtatgcaggamctgccaggcagscactggtgaagggccttgggcctatcatccccccaaccccacctcaccccacccgcctcctctagtggggtgagtctgggctggtggaccagaggagggtgtcacagaccctcagggactgccccatggacacctctgactggtgttaacagtgtgaacattttccccgtcttcagtcccttagaatgacgacagcccctggggttggggcaggcgagtgtggccacatcatccaagccctcccagagacacaaataggcttttttgctctaaaaataaataccagcccttttttggtcacaaatccagcatctcagcagaaaactgcctgacatgaaaagtcccctgaggaactgcatctgcgtttcaggggcttttcattttttctccttttttaaagtgtagattgtgggtgcttcctagaggcctgccttcttctggaactggaagtgggctatcaccatgggcaagcccttgggtgcaggctccccacctgcctgggaactctggcagctctcctcagctccttgggcttgagcagctgcaactgccccagatttgctgtggaagcaggggctagccctggcctcaccagggcctyccggggccctgcattgatgctcaggagttcctgggctgctcttgatcctttctgggcatccagcttccagttaagctctgtttgccaaacaaactattctcagctgccctttggcctgcgcctgatgtgttcctgttgcagtcccgcctgcctgagacaggagcaggcaggagagccttcatgcccagattcccacaggacaattggggagctgctggcattgtctttctgggaagattctgctttcttggaccaaatggcagcctgattaccagtgtcgggcctgcatgctgcccccgacacacgcacgcacgcgcacacacgtgtgcacatgggccatagccacaagccagctctcctccagggtcctttcaacctcgctgtccagggaccctgtccttcttgcccgtggggcttccatctggcagagaacgttcagggcttgttgaacttgaaagctcattagacttaagctgtcacctgtgcttggtgccccaggaacagccagagaggacagtgcccactcacttcttgttggcagcctcctgtgcaggaagtgccagccgggcctcgacgcaccagctggctgtgggtcctgaggaggggcgggaggcggccgctcagtgcagatggggactcctctcctctgccctgaccttaccctccattacctccttcactggagtggggctggggggtgggtggaatcagtgttttaatcggatttttaaaaaacattttatttctttgtacaattaccatcctatgtaaagatgaaatttgtgttgagttgaagattgtcatggaataaagatcacaccgtacttgaggccatcttcatgtaaaaaaaaaaaaaaaaaaaaa

SEQ ID NO: 300 - DNA, 1026 bp, Homo sapiens
  misc_feature (1026): n equals a,t,g, or c
gctcctgcgcgctgacgtcaggtgcgtgcccctgtccggcagccgaggagaccccgcgcagtgctgccaacgccccggtggagaagctgaggtcatcatcagatttgaaatatttaaagtggatacaaaactatttcagcaatgcagacaattaagtgtgttgttgtgggcgatggtgctgttggtaaaacatgtctcctgatatcctacacaacaaacaaatttccatcggaatatgtaccgactgtttttgacaactatgcagtcacagttatgattggtggagaaccatatactcttggactttttgatactgcagggcaagaggattatgacagattacgaccgctgagttatccacaaacagatgtatttctagtctgtttttcagtggtctctccatcttcatttgaaaacgtgaaagaaaagtgggtgcctgagataactcaccactgtccaaagactcctttcttgcttgttgggactcaaattgatctcagagatgacccctctactattgagaaacttgccaagaacaaacagaagcctatcactccagagactgctgaaaagctggcccgtgacctgaaggctgtcaagtatgtggagtgttctgcacttacacagaaaggcctaaagaatgtatttgacgaagcaatattggctgccctggagcctccagaaccgaagaagagccgcaggtgtgtgctgctatgaacatctctccagagccctttctgcacagctggtgtcggcatcatactaaaagcaatgtttaaatcaaactaaagattaaaaattaaaattcgtttttgcaataatgacaaatgccctgcacctacccacatgcactcgtgtgagacaaggcccataggtatggccccccccttccccctcccagtactagttaattttgagtaattgtattgtcagaaaagtgattagtactatttttttttgttgtttcaaaaaaaaaatttttgtgtgtgtgttttttttttttttttttttttgggggttaaaaan

SEQ ID NO: 301 - DNA, 830 bp, Homo sapiens
tggtgatctggactgtcccgactgggtcctggcagaaatcagcacgctggccaagatgtatgaraagatcctgaagctcacggctgacgccaagtttgagtcaggcgatgtgaaggccacagtggcagtgctgagtttcatcctctccagtgcggccaagcacagtgtcgatggcgaatccttgtccagtgaactgcagcagctggggctgcccaaagagcacgcggccagcctgtgccgctgttatgaggagaagcaaagccccttgcagaagcacttgcgggtctgcagcctacgcatgaataggttggcaggtgtgggctggcgggtggactacaccctgagctccagcctgctgcaatccgtggaagagcccatggtgcacctgcggctggaggtggcagctgccccagggaccccagcccagcctgttgccatgtccctctcagcagacaagttccaggtcctcctggcagaactgaagcaggcccagaccctgatgagctccctgggctgaggagaagggtgttccaggcctgtgtggagccgccctgcccgtatggagtcacgccctctgaactgctcttcgggaggcagccctggttctaggatgctgaggccctggcccggactctggcctcccagatccccagctgcctcacttctctcttgagaacttggctcagggctcctgaggacctttcccagcattaccttcccttcccttgaaaggcaattgttggctgttttcataagcaggaaaaataaacagaagtataaaggaaaaaaaaaaaaaaaaaaaaaaaaaaaaaaaaaaaaaaaaaaaaaaa

SEQ ID NO: 302 - DNA, 3300 bp, Homo sapiens
  misc_feature (1158): n equals a,t,g, or c
  misc_feature (3232): n equals a,t,g, or c
  misc_feature (3280): n equals a,t,g, or c
cagccgcgacagtctcaagggcggcggcgcgctggagaaggagagccatcgccgctcgtacccgctcaacgccgccagcctaaacggcgcccccaaggggggcaagtacgacgacgtcaccctgatgggcgcggaggtagccagcggcggctgcatgaagaccggactctggaagagcgaaactaccgtctaaggtggggcgggcgacgcggtagacgggctggccacgcggctcgttcccccgctcctcggggccctccaaggtgtctccgtagtcagcaggttggaggcagaggagccgatggctggaggaagcccacaggcggatgttccccacttgcctagagggcatccctctggggtagcgacagacaatcccagaaacacgcataatacatttccgtccagcccggggcagtctgactgtcggtgccctcccaggaacggggaaggcctccgtctgtgtgaaagggcacagcacatcccaggtgcaccctccccaagtactcccaccccgcctactgtccatgcggcctcactgggggccatcagcctcaccagcaaagcagagatgagagcgtgggaactgtgttctttcctccctgccctctactgatttcagcccagcccctgcctagatcctaggtcccttttcctcccgagtttggctggcacgagagctagcccagcacatgaagcaggtgatgttaagtcacaaggtgctgcttttcagatccactatgcaagaggggagggtggggccacgtgraaaggcagctctagacatcaaccagtcctgggggaggggagtgggaaccgggcacaactaggaacaatgccaccattcccacaggagtggtacttaaaccagacagcagggttcagaggtggcacacsgggacaaagctgaggccctgcacctcaacagctgactgccaggtgcctgtgggtgaactgaggggagtagagggagagggcaggtggaactggggcagaatctagtcatgccctaaagctagtcctgtaaacaatggtgccccagaaagctgcaggtggtgtttggagaagcagttacttttcagttacaagacccatctccctagtctcagccttacaacaccacgggactaaggaagagcacttccttgcctccgtaangccagaggaagaaccatcccaatcatttgatctccagctccacagtagagagaaacctacaaaatgtcaaaccagcttcccgactcccaggagctcaagccaagcccagaggcagtggctggggtccctgcaggtcatgaggggcctatgcctttactccttttaaacaccagcacccgtcttttccccaacctaaaaccaaccaccagcatttcactacaggaccaaatggaaaccgagggaaccctgggtcttgggaagaacaacaggaaaccaaggtctgacctagggttccctcccagtcttcacatcactctggcctcatcaccaaggtgacagaggacacaggggagggggaaaacccacacacactccttggaatgggtcctgttatttatgcttgctgcacagacatattagaagaaaaaaaaaagctttgtattattcttccacatatgctggctgctgtttacacaccctgccaatgccttagcactggagagctttttgcaatatgctggggaaaggggagggagggaatgaaagtgccaaagaaaacatgtttttaagaactcgggttttatacaatagaatgttttctagcagatgcctcttgttttaatatattaaaattttgcaaagccctttgagctactgccttagtctacccactgtccttttgttatgaggtagaggatctcatgacaccatacacacaaacccatcattgcctgtgaatgcacgtagggccagaattccccagttcccgctcctctgagggttgatactgctgggaatgccaaccactccacaagcagagggaagccccctcaggcctgcaggaggagccgcagcagtgtgtccaattcaaaccagcagcaaagagcctgacattttcccatccatctatgaggaaagccatctcacagaacatggacataggcaacttgctctcccacaccaagggatgggaatctctcctacctatagtcatccctgcactcctgactttactccaggacccagggtccaactaatggcagagcccctcttggttccttcaaacaagaaaagcaatacctacggactggtgtacacttccatccttggttataacaggaatgttatcaagctgtcagaacaggatgaagtgctcccagtggatatccatcagggagggttagggacactcgtggcagcctgtctagcagcctgggctctctgaaagtccctaacttcctgaggggtacgcaaatactgttctatttcactatcagaaatgttctcatctccagtgacagtggagacagggggtacagggcagatccgcttcggggacttcaacatgcagggtggcaagaraagggcaggactggccggccgcttcccctggggtaaacctaaggaattrkttcmcacctccccttctccttgcccctgtccccactccggtggctccttctctcgggtctccacttctgctgtcccatcccgaaaggcagagcggaccagtgactggcggtgctggagaaggtcaccgatgtgcttcaccacagaccgtttgtcaagtctcagaactcgtaaccaggccagctgctcagccatccgcagcagcacagccagcagctcctgcaggcgggaggacgccgggtagggcaggtccacatttgccaatttacaaaatcgggcaagggaacatgaaagccgatctgcaggctgcagcgactgccaagccaggaaagtcgcagcagtgatgacgggcaagggatgcctcccggtcaccagccacgtctcatttgccagctccaccaactgcattgttcgagacagcatcttctctttgtcttccacgtatttggctggcacagaaggtgaagcttggaacagtttgaagctgaaataaccaaaatgagggttggatcttaatgatataggggctgctctcccacagtgaggaaagacagcccactcaagatggggaagctattctgccctcaggaatactcaagctcactgggcagcaagttaataaaggtagtgagagaaaacagggcgtcttccgcttgttaggggnaggtggaaggatggaggagaaccacgaacatttattgggccgctcccnatccacattattctgagtgc

SEQ ID NO: 303 - DNA, 475 bp, Homo sapiens
  misc_feature (444): n equals a,t,g, or c
  misc_feature (451): n equals a,t,g, or c
  misc_feature (454): n equals a,t,g, or c
  misc_feature (470): n equals a,t,g, or c
caaagaattcggcacgaggtctgatcttcctgcggctgaaccgcccggctgagccgacattgccggcgtcttggcgattcggcccgacgagctccgctttcgctacagcatggtggcctactggagacaggctggactcagctacatccgatactcccagatctgtgcaaaagcagtgagagatgcactgaagacagaattcaaagcaaatgctgagaagacttctggcagcaacgtaaaaattgtgaaagtaaagaaggaataatctaccctgactaaagcttgaaatgctacatttccaaggtgaagatgtgtgggcacatgttatggcagattgaaaaggatctcattccatgggaaaaaaaaaaatcctgtcttgttcataaattgacaatgtcaataaattgaaatatggttcactgttaaaaaaaaaaaaaaaaaaanggggggnccnttttaaagaatccaantttac

SEQ ID NO: 304 - DNA, 2902 bp, Homo sapiens
  misc_feature (2888): n equals a,t,g, or c
  misc_feature (2891): n equals a,t,g, or c
ttacatgctaatcaagtgatccacagagacatcaaaagtgacaatgtacttttgggaatggaaggatctgttaagctcactgactttggtttctgtgcccagatcacccctgagcagagcaaacgcagtaccatggtcggaacgccatactggatggcaccagagktggttacacggaaagcttatggccctaaagtcgacatatggtctctgggtatcatggctattgagatggtagaaggagagcctccatacctcaatgaaaatcccttgagggccttgtacctaatagcaactaatggaaccccagaacttcagaatccagagaaactttccccaatatttcgggatttcttaaatcgatgtttggaaatggatgtggaaaaaaggggttcagccaaagaattattacagcatcctttcctgaaactggccaaaccgttatctagcttgacaccactgatcatggcagctaaagaagcaatgaagagtaaccgttaacatcactgctgtggcctcatactcttttttccattttctacaagaagccttttagtatatgaaaattattactctttttggggtttaaagaaatggtctgcataacctgaatgaaagaagcaaatgactattctctgaagacaaccaagagaaaattgcaaaaagacaagtatgacttttatatgaaccccttctttagggtccagaaggaattgtggactgaatcactagccttaggtctttcagcaaacagcctatcagggccatttatcatgtgtgagatttgcattttactttgctgactttgttgtaatagatcccattcattgtcccctttggggtatttccaatacttgaatggcagattggagtttttcagagtatgtgtttcatctgctagtctttctctccttcatagcttttcttttcctggacttgctccttttgagttgcttttgcgtttctcatgcctaggcaagtgtaatagaaattatgtagctccttatgttggcaaaggagctctatatagtttcactttgtataaaagttaggaccagctgttgttacatgtaatattttagttcagaacttgacctgaaggaagggaagaaaagtatgtgatttttaccttttttaacaaatgtgaaaaagtcagttttagaaatttcgtggtagtaagttcggcatttgttacatgtatagagagaagactaataatctctatttataactaaatcattgagatagaaaaagattcccattgactgtagacttcttcccattttgtcttcccttctgcctgtttccccttcaggcttggctctaggaaccaaagtgatttgttgttgttccaacctgggctttgtgactttggttagtgccactaccttcttccctcctttcccccttcaatttggaaataaatttctgtatatgttgcaattttaggtttaggtttgttctttttctttttcattaatcctctctcacctcacagataccccctcccatggcaaataatataataaccagtgaattttcaggaatttaaaaattagcttttttccacttaaaggagaaaaatatttgggactagcagcagaggcagtaagagatgtgaaccttggtgagctctgatacagtgagaagagattatactcatgaaagagaatgttagtgttacagagaagcagccgatagcaaatcractgtagagacttggcggcggtggcattgccccaggtcgtcagcagtgtggtattatctatgagaacttgagcgacagagtatttcttgatgaatttatagatcatttgagatgttgagttactttagtttagttttgttttgttttttcaaataagtagagactattgtaaaaaacgagaaaggaaaatgaaatgtgcgtgttgatagcaataatttgtttcttttaaagattctaaaaggtctgagacctgtagcattaattatttgagtgccctcccttctcccctcccctcccttttctcttctcttttttcctctcctctycttctcctttattcattgttttgcttttggagtrggtgttgttcaagtatctgtggtttggttctggcattttgttcccaccatccccttcccccattaacttcccccctgcttgccatcctgcagtagtataaatcatgaataaaaaataattttgctgttgtagtatacattggagaaactggcaggttttatttccattattttatttccactatatctatgataagatgcaattataaggagagaagtgactgttttttattgataaggcaagattttcagaaaaatgagtaaaataattaatgaaacatatttagagcacttaatggtctctgttttcaatataattcttgatttcatttttctctggaatatattggccttctacagctattactgaattatagaaactggtttatttctggcagaaagctgcagtgccacctgagttccaaattttaccattctttgtaaacagttggatggattatgataaagaagatgctaccaatgaaatagaaaaccaacgagatgagaagactgtgatcctcatgtactcagaggcacttccctcctaagtcaaagaccatcctcactgactatgtgccaacgcctcgtttcaggcttgtgactcaacaaagggcttttccattgatagaagcagtttgggatttgtagttgcgacttcttcgatagttacctgcacgtccattgctggcaactgacttgtcattaaaacctggctctttggttaagggagctacgctgtggtttattcttaagttacgtggataaactaacctctaacagaaatatactttggttaattttgaaaaaaaaaaaaaaaaacncgngggggggcccg

SEQ ID NO: 305 - DNA, 1553 bp, Homo sapiens
ggcgacgcggtatttgaatcctggaacaargctacagcgtcgaagatccccagcgctgcgggctcggagagcagtcctaacggcgcctcgtacgctagtgtcctcccttttcagtccgcgtccctccctgggccgggctggcactcttgccttccccgtccctcatggcgctgctccgacgcccgacggtgtccagtgatttggagaatattgacacaggagttaattctaaagttaagagtcatgtgactattaggcgaactgttttagaagaaattggaaatagagttacaaccagagcagcacaagtagctaagaaagctcagaacaccaaagttccagttcaacccaccaaaacaacaaatgtcaacaaacaactgaaacctactgcttctgtcaaaccagtacagatggaaaagttggctccaaagggtccttctcccacacctgaggatgtctccatgaaggaagagaatctctgccaagctttttctgatgccttgctctgcaaaatcgaggacattgataacgaagattgggagaaccctcagctctgcagtgactacgttaaggatatctatcagtatctcaggcagctggaggttttgcagtccataaacccacatttcttagatggaagagatataaatggacgcatgcgtgccatcctagtggattggctggtacaagtccactccaagtttargcttctgcaggagactctgtacatgtgcgttggcattatggatcgatttttacaggttcagccagtttcccggaagaagcttcaattagttgggattactgctctgctcttggcttccaagtatgaggagatgttttctccaaatattgaagactttgtttacatcacagacaatgcttataccagttcccaaatccgagaaatggaaactctaattttgaaagaattgaaatttgagttgggtcgacccttgccactacacttcttaaggcgagcatcaaaagccggggaggttgatgttgaacagcacactttagccaagtatttgatggagctgactctcatcgactatgatatggtgcattatcatccttctaaggtagcagcagctgcttcctgcttgtctcagaaggttctaggacaaggaaaatggaacttaaagcagcagtattacacaggatacacagagaatgaagtattggaagtcatgcagcacatggccaagaatgtggtgaaagtaaatgaaaacttaactaaattcatcgccatcaagaataagtatgcaagcagcaaactcctgaagatcagcatgatccctcagctgaactcaaaagccgtcaaagaccttgcctccccactgataggaaggtcctaggctgccgtggcccctggggatgtgtgcttcattgtgccctttttcttattggtttagaactcttgattttgtacatagtcctctggtctatctcatgaaacctcttctcagaccagttttctaaacatatattgaggaaaaataaagcgattggtttttcttaaggtaaaaaaaaaaaaaaaaaaactcgag

SEQ ID NO: 306 - DNA, 1987 bp, Homo sapiens
  misc_feature (731): n equals a,t,g, or c
cagtcaaatgcagtctggcttcttggacatcttcatctatctactctatcctcaagtcaaagtagagcctctgttcctactgactatagctacttgcctgaaagcagttttattggagcagctattggcttcttcattacaggaggaaaaaaaggtcctgaatctgtgcctccttcccttcttaaagtagtgatgaaacccatagcaactgttggagaaagctaccaatatcctcctgtgaactgggctgcacttctctctccacttatgaggctaaattttggtgaagagatccagcaactgtgccttgaaattatggtgacccaggcacagtcatcccagaatgcagctgcactattgggcttgtgggtgacaccaccactgatccacagtctgagtctgaataccaagagatatctcctgatatctgcacctctgtggataaaacacatctctgatgaacagatcctgggttttgttgaaaatttaatggtggcagtttttaaagcagcttccccacttggaagtcctgagctatgcccaagtgctttacacggtctgagccaggccatgaaactgcccagccctgcccaccacctctggagtctgctctctgaagctactgggaaaatttttgacctcctgccaaataagattcggagaaaggatctagagctgtatatcagcatagcaaaatgcctcttagaaatgacagatgatgatgccaatcnggatcgcccaggttactaagagcaacatagaaaaagctgcctttgtcaaactgtacttagtctctcaaggacgattccccttggtgaacctgaaccgatatgctgagcgttgctgtgcagcaccgtgagaaagaggtgttggcctggatgattctgcacagcttataccaggcacggattgtgagccatgccaatacgggcgttttgaagagaatggagtggctcttggaactgatgggttatattagaaatgttgcttaccagtcaacatcctttcacaatacggctcttgacgaggctttggacttcttcttgctgatatttgcaaccgcagtggttgcatgggctgaccacactgcccctctcctcctcggcctcagtgccagttggttgccatggcatcaggagaatggcccggctgggccagtaccaagcttccttggcaggagtccaatgcacagggtcactctgcaggaggttctcactctccttcccaatagcatggctctgctgctgcagaaagagccatggaaggaacagacccagaagttcattgactggctattcagcatcatggaaagccctaaagaagccctctcagcacagtccagggatcttttgaaagccaccctgctgtccttgagagttctcccagagtttaagaagaaagctgtatggaccagagcatatggttggtgaacagttttgcagtaaccagcagcattctcagctggatgaggaaaaccatataagtggaagaagtttttcagaattcatgcctggtattgctgagacatgatgcagagagttaagggtcatgaaaagatggccacatcactgacagcttgacacatgcctcctaagagaggagtgcattgctttagtacccgggccagttgagactgaaacaggaacttggattttctttatttggcttgagttcaatgtggagattttctttgtgaaagcttgaagatattatcttctccctgctaaattccagtaaaataatgttgtcaattttgtgcgtgtgacttttgttttaaggcatgggggaaggtgccagaaccacttggtgacaatggcattatgatctattttccatgaatctccatgaggatattcattgactcagtgagttagacaaatttccttattgataaaacactctcttggaactgctatacacatttaaataataagcataacattgaatattagctaaatcagattcattaatggtgtctatcatttcc

SEQ ID NO: 307 - DNA, 785 bp, Homo sapiens
gcgcgacccgccccgtcccgtccagtctggcctgggcgccgcgggaacgctgtcctggctgccgccacccgaacagcctgtcctggtgccccggctccctgccccgcgcccagtcatgaccctgcgcccctcactcctcccgctccatctgctgctgctgctgctgctcagtgcggcggtgtgccgggctgaggctgggctcgaaaccgaaagtcccgtccggaccctccaagtggagaccctggtggagcccccagaaccatgtgccgagcccgctgcttttggagacacgcttcacatacactacacgggaagcttggtagatggacgtattattgacacctccctgaccagagaccctctggttatagaacttggccaaaagcaggtgattccaggtctggagcagagtcttctcgacatgtgtgtgggagagaagcgaagggcaatcattccttctcacttggcctatggaaaacggggatttccaccatctgtcccagcggatgcagtggtgcagtatgacgtggagctgattgcactaatccgagccaactactggctaaagctggtgaagggcattttgcctctggtagggatggccatggtgccagccctcctgggcctcattgggtatcacctatacagaaaggccaatagacccaaagtctccaaaaagaagctcaaggaagagaaacgaaacaagagcaaaaagaaataataaataataaattttaaaaaaaaaaaaaaaaaaaaaaaaaaaaaaaaaaaaaaaaaaaaaaaaa

SEQ ID NO: 308 - DNA, 2178 bp, Homo sapiens
ggcagaggrcgggaagaccgagtggctctttggcatggatgagggccggaaacagctggcggccagtgctggcttcaggaggttgattacagtggcccttcaccgaggtcagcagtatgaaagcatggaccacatccaagctgagctgtcrgctagagtcatggagctggccccagctgggatgcccacccagcagcaggtcccctttctgtctgtgggtggggacattggggtccggaccgttcagcaccaagactgcagccccttgagcggtgactatgtcattgaggatgtgcaaggggatgacaagcgatacttccgtcgactgatcttcctcagcaacaggaatgtggtgcagtccgaagccaggttgctgaaggatgtgtctcacaaagcccagaagaagcggaaaaaggacaggaagaagcagcggcctgctgatgcggaggacctccctgcagccccggggcagtccattgataagagttacctgtgttgtgaacaccacaaagccatgatcgctggccttgccctgctgagaaacccagagctactcctagagatcccactggcattgttggtggtaggcctgggcgggggcagcctccccctctttgtccacgatcattttccaaagtcctgcattgatgctgtggagatcgatccctccatgttggaagtggccacccagtggtttggcttctcccagagtgaccgaatgaaggtccacattgcagatggcctggactatatcgccagcttggcaggaggaggagaagcacggccttgctacgatgtcataatgtttgatgttgacagtaaggacccaacactgggaatgagttgtccgcccccagcatttgtggagcaatcttttctacagaaggttaaaagcatcttgactcctgaaggtgtttttattctcaaccttgtgtgccgagacttggggctaaaagactcagtgctggctgggctcaaggcagtgttccccctcctatatgtccggcgaattgagggtgaagtgaatgagatcctgttctgtcagctgcaccctgagcaaaaacttgccacaccagagctcctagaaacagcccaggctttggagcggaccctgaggaagcctgggaggggttgggatgacacgtatgtcttgtcagatatgctcaagacggtgaaaattgtgtgactgcttaggccaagcagccctcctgcctagactgaccttggactcccagcctgccagagaatgaagaaatacaacgcacagtacttttgaagcttcgtatttttcttggtttcacactcagctacatgtgacctccagcttggtgaggttgcctgaagattagggaaaataaaaatgtccttcccatcttgtcctcttcagtaccacttgggttggtttgtctttgcttcctacaccacgtccttgagtggagttccctgctgaagcccctagcacacactgcatgccttaacaagtgtgtgcaagcccctcagaactcaagacatccaaattttattgcgtctctacttatactggtttgcttttgatttattcctctattagttctataggagtgatctcaagtgagatagcagagcaagatgccaaaagaccataaatagagtaaggtttctatagatgtgagacagatttgagagagcatttactctgtctccctgtggatgaaactgctgctgaaatggttccaatttttaggaatctgcttacccacttcattatttgacagctttccttggtgacccaaaccttgtagcctaagccatttgtctttttctcagtggagggagtgtatggacctggccccatggctttgcatgttagagacctggcagactaaagtctctagtgtttgtttgctcacatttgctgagtgacagctatgtgccagactgcataaagggtggtggcagaagtgaaaatgtttaagaatgaccaaaaacattagtaatgaaagttaatgtgttccaggcattcttctaagtggtttacatgcactgtctcatttaatctgagataaaggatacttaagcccaaactatatctaaacccaaatctcacttggctggaaacatcaatcttaaccatttattcagaaccattaaaccaatgattccaaaaaaaaaaaaaaaaaaaaaaaaaaaaaactcgta

SEQ ID NO: 309 - DNA, 875 bp, Homo sapiens
caagctcctgtggccacctgtgtcccagcagcagtgagtggagctgctcagggtgccctctcctgcggaccagtctctgaatgttcaaagatgagggcctggcttccgtgctctggctttgtaacttatctggaagggaaagcacatgccttcacgggcagggtatgttccttttcttctcggggtgttgacttgcattcctgtgtgaactgttccctctgccatgtttaccgtgtgatgttctgtagttgaaaatgttagttgtctgctggcacagaatttatctcgttcctttctctcccttctctcctccaaatcagtctcttcccttctccactagataactgtaaaaccttttcctggggtacatacattcgttaaytcttgggcagtggtgagcacgagatgactttctgcagcgtttatcactgttgggtggagtcacgtcccttccctccaccgaagtcatcaaccagatagggaagggaaagatgaggcccagaaaacgagttcaaactctaggtcttgtacacgtatgtaagtaaatgtcaataacccaagcctttgtcatagcagtcacttggttgacttaggatctgggtctgttgaattttgtgcttgggaatggagctggagggagtggggcctgtgtacagcagctacctctcccaggtcctctcacttgcctgccccgcgtcctggttgcatggccgcacctgtgtgtgtgcagaggtctgtgtcccatcctctgcacctcctttccgggggcctggggagccccacgtgttgccaagatcttggtgcaataaaatactccggttttgtgaaaaaaaaaaaaaaaaaaaaaaaaaaaaaaaaaaaaaaaaaaaaaaaaa

SEQ ID NO: 310 - DNA, 756 bp, Homo sapiens
  misc_feature (613): n equals a,t,g, or c
  misc_feature (638): n equals a,t,g, or c
  misc_feature (684): n equals a,t,g, or c
  misc_feature (756): n equals a,t,g, or c
atttaggtgacackatagaaggtcgcctgcaggtaccggtccggaattcccgggtcgacccacgcgtccgggcccgtggcgccgacaggatgggcaagtgtcgtggacttcgtactgctaggaagctccgtagtcaccgacgagaccagaagtggcatgataaacagtataagaaagctcatttgggcacagccctaaaggccaacccttttggaggtgcttctcatgcaaaaggaatcgtgctggaaaaagtaggagttgaagccaaacagccaaattctgccattaggaagtgtgtaagggtccagctgatcaagaatggcaagaaaatcacagcctttgtacccaatgacggttgcttgaactttattgaggaaaatgatgaagttctggttgctggatttggtcgcaaaggtcatgctgttggtgatattcctggagtccgctttaaggttgtcaaagtagccaatgtttctcttttggccctatacaaaggcaagaaggaaagaccaagatcataaatattaatggtgaaaacactgtagtaataaattttcatatgccaaaaaaaaaaaaaaaaaaaaaaaagggsgggcscyctaaaagatcctcnaagggccaagcttacgctgcatgcnactctactctctcctatatgaatctattataactagcctggcctcnttacactctgatggaattctactggattttaagactatcttgttatatgacactctcaaataaccagtattn

SEQ ID NO: 311 - DNA, 851 bp, Homo sapiens
  misc_feature (834): n equals a,t,g, or c
ctattggtgtgaacagtgtgatgtacaattctcctcaagcagtgaactctacctacatttccaggagcacagctgtgatgaacagtacttgtgtcagttctgtgaacatgaaactaatgatccagaagacttgcatagccatgtggtaaatgagcatgcatgtaaattaatagagttaagtgataagtataacaatggtgaacatggacagtatagcctcttaagcaaaattacctttgacaaatgtaaaaacttctttgtatgtcaagtatgtggttttcggagtagacttcacacaaatgttaacaggcatgttgctattgaacatacaaaaatttttcctcatgtttgtgatgactgtgggaaaggcttttcaagtatgctagaatattgcaagcatttaaattcacatttatctgaagggatttatttatgtcaatattgtgaatattcaacaggacaaattgaagatcttaaaattcatctagatttcaagcattcagctgacttgcctcataaatgtagtgactgcttgatgaggtttggaaatgaaagggaattaataagtcaccttccagtccatgagacaacttgattattctctttaacttacagaatgttagtttaaaataataaattcatcctttttttggagatgattaaatggatgattgtaaacacaacttatgaaatctgcctttaacaagtaacttttttaaattataaaattttattggcattgctccattttctgtatataaatatatctttaatgtggtattttcaaaaaaaaaaaaaaaaaaaaaatccacgcggccgcgaattcccgggtcnaacaagctcactaatcc

SEQ ID NO: 312 - DNA, 1335 bp, Homo sapiens
cagaaccgcaccagcagccaaccttgccagcaggattcctgcagcctctgcggcagccatgaacctagccagcaaaggagcggcggagttcctcctcgtcgtcgtcgtcctctagctcctcctcctcttcatcatcgtcgtcgtcgtcctcctcctcctctggctccagttctagtgactcagagggctctagccttcctgtgcaacctgaggtggcactgaagagggtccccagccccaccccagccccaaaggaggctgttcgagagggacgtcctccggagccaaccccagccaaacggaagaggcgctctagcagttccagttccagctcctcctcttcatcttcctcctcctcctcctcctcctcttcttcctcctcctcttcctcttcttcttcttcctcctcatcttcctcctcctcgtcgtcttcctccccttcccctgctaagcctggccctcaggcttgcccaaacctgcaagccccaagaagccaccccctggcgagcggaggtcccgcagcccccggaagccaatagactccctcagggactctcggtccctcagctactcgcctgtggagcgtcgccgtccctcgccccagccctcaccacgggaccagcagagcagcagcagtgagcggggttcccggagaggccagcgtggggacagccgctcccccagccacaagcgcaggagggagacacctagccctcggcccatgagacaccgctcctccaggtctccataaattgtctttgggggattccaccacacccaatgctctggagccacaaggagtgtcccttcttccccagcagagccgtgggagggtccttgtctgctctcctttgaaccttggcagcccttggatggagggctccctttccctccccttttttttttctttgttcctgtgaaatgttaatctccgtgagttcttcctggttcatgtgttctggggggtttggggtgggagggaatgcagatgggagttgggggaggggaggatacagttcaggataccccagcctggagtcagggccagggaggcatggccccacttgtatccagaagttcccaggggtgattgtgatggtggttgggactggaggttgtataaggtgttcttggaaggaaggggcaggagttggaattagttggtccctactgtcccccatgaggttgtgaacccctccccccaacttttcatgtttcttaaaggcattttggttttttaaaatctgtacagcaagagcaactttttctgtcaaataaaaatgagaaatgcaggaaaaaaaaaaaaaaaaaaaaaaaaaaaaaaaaaaaaaaaaa

SEQ ID NO: 313 - DNA, 516 bp, Homo sapiens
  misc_feature (505): n equals a,t,g, or c
tcgacccacgcgtccgaacatggcggcgggagtgtccgcggtggtggcggtgcaagagagctgagggaggcgcgagggcgcggagttccaggtcgagcagttaggccgcgagcgactgcggcgccgagccgatgagtaacccgaagcccctagaggagtggtcacctgcctgagggcacttctgtcccaccagcatcagaccaggccgcaccgagtccccggcaccatgtttgggaagaggaagaagcgggtggagatctccgcgccgtccaacttcgagcaccgcgtgcacacgggcttcgaccagcacgagcagaagttcacggggctgccccgccagtggcagagcctgatcgasgagtcggctcgccggcccaagcccctcgtcgaccccgcctgcatcacctccatccagcccggggcccccaagaccatcgtgcggggcagcaaargtgccaaagatggggccctcacgctgctgctggacgagtttgagaacatgttngtgacacgctt

SEQ ID NO: 314 - DNA, 1833 bp, Homo sapiens
  misc_feature (625): n equals a,t,g, or c
  misc_feature (1761): n equals a,t,g, or c
  misc_feature (1766): n equals a,t,g, or c
  misc_feature (1792): n equals a,t,g, or c
  misc_feature (1806): n equals a,t,g, or c
  misc_feature (1827): n equals a,t,g, or c
tcgacccacgcgtccgcagccgtcgcccgacgaggcgcgaccgctgcaggcgctgctggacggccgcgggctctgcgtcaacgctagtgccgtcagccgcctgcgcgcctacctgctgccagcgccgccagctccaggaaatgctagtgagtcggaggaagaccgcagcgccggcagtgtggagagcccgtccgtctccagcacgcaccgggtgtctgatcccaagttccaccccctccattcaaagataatcatcatcaagaaagggcatgctaaagacagccagcgctacaaagttgactacgagtctcagagcacagatacccagaacttctcctccgagtccaagcgggagacagaatatggtccctgccgtagagaaatggaagacacactgaatcacctgaagttcctcaatgtgctgagtcccaggggtgtacacattcccaactgtgacaagaagggattttataagaaaaagcagtgtcgcccttccaaaggcaggaagcggggcttctgctggtgtgtggataagtatgggcagcctctcccaggctacaccaccaaggggaaggaggacgtgcactgctacagcatgcagagcaagtagacgcctgccgcaagnttaatgtggagctcaaatatgccttattttgcacaaaagactgccaaggacatgaccagcagctggctacagcctcgatttatatttctgtttgtggtgaactgattttttttaaaccaaagtttagaaagaggtttttgaaatgcctatggtttctttgaatggtaaacttgagcatcttttcactttccagtagtcagcaaagagcagtttgaattttcttgtcgcttcctatcaaaatattcagagactcgagcacagcacccagacttcatgcgcccgtggaatgctcaccacatgttggtcgaagcggccgaccactgactttgtgacttaggcggctgtgttgcctatgtagagaacacgcttcacccccactccccgtacagtgcgcacaggctttatcgagaataggaaaacctttaaaccccggtcatccggacatcccaacgcatgctcctggagctcacagccttctgtggtgtcatttctgaaacaagggcgtggatccctcaaccaagaagaatgtttatgtcttcaagtgacctgtactgcttggggactattggagaaaataaggtggagtcctacttgtttaaaaaatatgtatctaagaatgttctagggcactctgggaacctataaaggcaggtatttcgggccctcctcttcaggaatcttcctgaagacatggcccagtcgaaggcccaggatggcttttgctgcggccccgtggggtaggagggacagagagacagggagagtcagcctccacattcagaggcatcacaagtaatggcacaattcttcggatgactgcagaaaatagtgttttgtagttcaacaactcaagacgaagcttatttctgaggataagctctttaaaggcaaagctttattttcatctctcatcttttgtcctccttagcacaatgtaaaaaagaatagtaatatcagaacaggaaggaggaatggcttgctggggagcccatccaggacactgggagcacatagagattcacccatgtttgttgaacttagagtcattctcatgcttttctttataattcacacatatatgcagagaagatatgttcttgttaacattgtatacaacatagccccaaatatagtangrtcntatactagrtwatycctgggtggaangtttgggaggtgcntttttggataccactttgggncctgga

SEQ ID NO: 315 - DNA, 1354 bp, Homo sapiens
ggtgagagcgcgcgcttgcggacgcggsggcattaaacggttgcaggcgtagcagagtggtcgttgtctttctaggtctcagccggtcgtcgcgacgttcgcccgctcgctctgaggctcctgaagccgaaaccagctagactttcctccttcccgcctgcctgtagcggcgttgttgccactccgccaccatgttcgaggcgcgcctggtccagggctccatcctcaagaaggtgttggaggcactcaaggacctcatcaacgaggcctgctgggatattagctccagcggtgtaaacctgcagagcatggactcgtcccacgtctctttggtgcagctcaccctgcggtctgagggcttcgacacctaccgctgcgaccgcaacctggccatgggcgtgaacctcaccagtatgtccaaaatactaaaatgcgccggcaatgaagatatcattacactaagggccgaagataacgcggataccttggcgctagtatttgaagcaccaaaccaggagaaagtttcagactatgaaatgaagttgatggatttagatgttgaacaacttggaattccagaacaggagtacagctgtgtagtaaagatgccttctggtgaatttgcacgtatatgccgagatctcagccatattggagatgctgttgtaatttcctgtgcaaaagacggagtgaaattttctgcaagtggagaacttggaaatggaaacattaaattgtcacagacaagtaatgtcgataaagaggaggaagctgttaccatagagatgaatgaaccagttcaactaacttttgcactgaggtacctgaacttctttacaaaagccactccactctcttcaacggtgacactcagtatgtctgcagatgtaccccttgttgtagagtataaaattgcggatatgggacacttaaaatactacttggctcccaagatcgaggatgaagaaggatcttaggcattcttaaaattcaagaaaataaaactaagctctttgagaactgcttctaagatgccagcatatactgaagtcttttctgtcaccaaatttgtacctctaagtacatatgtagatattgttttctgtaaataacctatttttttctctattctctgcaatttgtttaaagaataaagtccaaagtcagatctggtctagttaacctagaagtatttttgtctcttagaaatacttgtgatttttataatacaaaagggtcttgactctaaatgcagttttaagaattgtttttgaatttaaataaagttacttgaatttcaaaaaaaaaaaaaaaaaaaaaaaaaaaaaaaaaaaaaaaaaaaaaaaaaaaaaaa

SEQ ID NO: 316 - DNA, 2421 bp, Homo sapiens
ggcacgagctcttctgggcgtgggagaaggttctgtctatcagtgctgcgagaaaggaaagaaacaagtttgctctcagcggatctttaaatggatgagatggctaccactcagatttccaaagatgagcttgatgaactcaaagaggcctttgcaaaagttgatctcaacagcaacggattcatttgtgactatgaacttcatgagctcttcaaggaagctaatatgccattaccaggatataaagtgagagaaattattcagaaactcatgctggatggtgacaggaataaagatgggaaaataagttttgacgaatttgtttatatttttcaagaggtaaaaagtagtgatattgccaagaccttccgcaaagcaatcaacaggaaagaaggtatttgtgctctgggtggaacttcagagttgtccagcgaaggaacacagcattcttactcagaggaagaaaaatatgctkttgttaactggataaacaaagctttggaaaatgatcctgattgtagacatgttataccaatgraccctaacaccgatgacctgttcaaagctgttggtgatggaattgtgctttgtaaaatgattaacctttcagttcctgataccattgatgaaagagcaatcaacaagaagaaacttacacccttcatcattcaggaaaacttgaacttggcactgaactctgcttctgccattgggtgtcatgttgtgaacattggtgcagaagatttgagggctgggaaacctcatctggttttgggactgctttggcagatcattaagatcggtttgttcgctgacattgaattaagcaggaatgaagccttggctgctttactccgagatggtgagactttggaggaacttatgaaattgtctccagaagagcttctgcttagatgggcaaactttcatttggaaaactcgggctggcaaaaaattaacaactttagtgctgacatcaagcttattgacttcagtaattcagtgaaggattccaaagcctatttccatcttctcaatcaaatcgcaccaaaaggacaaaaggaaggtgaaccacggatagatattaacatgtcaggtttcaatgaaacagatgatttgaagagagctgagagtatgcttcaacaagcagataaattaggttgcagacagtttgttacccctgctgatgttgtcagtggaaaccccaaactcaacttagctttcgtggctaacctgtttaataaatacccagcactaactaagccagagaaccaggatattgactggactctattagaaggagaaactcgtgaagaaagaaccttccgtaactggatgaactctcttggtgtcaatcctcacgtaaaccatctctatgctgacctgcaagatgccctggtaatcttacagttatatgaacgaattaaagttcctgttgactggagtaaggttaataaacctccatacccgaaactgggagccaacatgaaaaagctagaaaactgcaactatgctgttgaattagggaagcatcctgctaaattctccctggttggcattggagggcaagacctgaatgatgggaaccaaaccctgactttagctttagtctggcagctgatgagaagatataccctcaatgtcctggaagatcttggagatggtcagaaagccaatgacgacatcattgtgaactgggtgaacagaacgttgagtgaagctggaaaatcaacttccattcagagttttaaggacaagacgatcagctccagtttggcagttgtggatttaattgatgccatccagccaggctgtataaactatgaccttgtgaagagtggcaatctaacagaagatgacaagcacaataatgccaagtatgcagtgtcaatggctagaagaatcggagccagagtgtatgctctccctgaagaccttgtggaagtaaagcccaagatggtcatgactgtgtttgcatgtttgatgggcaggggaatgaagagagtgtaaaataaccaatctgaataaaacagccatgctcccaggtgcatgattcgcaggtcagctatttccaggtgaagtgcttatggcttaaggaactcttggccattcaaaggacttttcattttgattaacaggactagcttatcatgagagccctcaggggaaagggtttaagaaaaacaactcctctttcccatagtcagagttgaatttgtcaggcacgcctgaaatgtgctcatagccaaaacattttactctctcctcctagaatgctgcccttgacatttcccattgctgtatgttatttcttgctctgktawcytttgccctcttagaatgtccctctcttgggacttgcttagatgatgggatatgaatattattagacagtaattttgctttccatccagtatgcta

SEQ ID NO: 317 - DNA, 1092 bp, Homo sapiens
aattcggcacagattgatattgtgtactataatagagactctttaaggagaatcttaaaaaaaaaaaaacgtttctcactgtcttaaatagaatttttaaatagtatatattcagtggcattttggagaacaaagtgaatttacttcgacttcttaaatttttgtaaaagactataagtttagacatctttctcattcaaatttaaagatatctttctcctcttgatcaatctatcaatattgatagaagtcacactagtatataccatttaatacatttacactttcttatttaagaagatattgaatgcaaaataattgacatatagaactttacaaacatatgtccaaggactctaaattgagactcttccacatgtacaatctcatcatcctgaagcctataatgaagaaaaagatctagaaactgagttgtggagctgactctaatcaaatgtgatgattggaattagaccatttggcctttgaactttcataggaaaaatgacccaacatttcttagcatgagctacctcatctctagaagctgggatggacttactattcttgtttatattttagatactgaaaggtgctatgcttctgttattattccaagactggagataggcagggctaaaaaggtattattatttttcctttaatgatggtgctaaaattcttcctataaaattccttaaaaataaagatggtttaatcactaccattgtgaaaacataactgttagacttcccgtttctgaaagaaagagcatcgttccaatgcttgttcactgttcctctgtcatactgtatctggaatgctttgtaatacttgcatgcttcttagaccagaacatgtaggtccccttgtgtctcaatactttttttttcttaattgcatttgttggctctattttaatttttttcttttaaaataaacagctgggaccatcccaaaagacaagccatgcatacaactttggtcatgtatctctgcaaagcatcaaattaaatgcacgcttttgtcatgtcaaaaaaaaaaaaaaaaaaaaaaaaaaaaaaaaaaaaaaaaaaaaaaaaaaaaaaaaac

SEQ ID NO: 318 - DNA, 1380 bp, Homo sapiens
gaagtatatggtggcagtcttgataaggaatttgatgaatcttcacccaaacaacctacaaatccttatgcatcatctaaagcagctgctgaatgttttgtacagtcttactgggaacaatataagtttccagttgtcatcacaagaagcagtaatgtttatggaccacatcaatatccagaaaaggttattccaaaatttatatctttgctacagcacaacaggaaatgttgcattcatgggtcagggcttcaaacaagaaacttcctttatgctactgatgttgtagaagcatttctcactgtcctcaaaaaagggaaaccaggtgaaatttataacatcggaaccaattttgaaatgtcagttgtccagcttgccaaagaactaatacaactgatcaaagagaccaattcagagtctgaaatggaaaattgggttgattatgttaatgatagacccaccaatgacatgagatacccaatgaagtcagaaaaaatacatggcttaggatggagacctaaagtgccttggaaagaaggaataaagaaaacaattgaatggtacagagagaattttcacaactggaagaatgtggaaaaggcattagaaccctttccggtataatcaccatttatatagtcgagacagttgtcaaagaagaaagttatcctacctcgccaagtggtatgaaattaagtgaccaaatgaagtgcactcttttcttttggaattagattcatgactttctgtataaaattcaaatgcagaatgcctcaatctttgggagagtttcagtactggcatagaatttaaatgtcaaaattctttctgaaaccctttctcctagaaactaggaaataataggtgtagaagactctccctaagggtagccaggaagaagtctcctgattcggacaaccatgaggggtagtggtgctagggagaaggcaaccttcactggttttgaactcagtgcctaagaaagtctctgaaatgttcgtttttaggcaatataggatgtcttaggccctaattcaccatttcttttttaagatctgatatgctatcattgccttaataatggaacaaaatagaagcatatctaacactttttaaattgataattttgtaaaattgattacgttgaatgctttttaagagaagtgtgtaaagtttttatattttcacaattaacgtatgtaaaaccttgtatcagaaatttatcatgtttactgtttaaaatgattgtatttataaaattgtcaatatcttaatgtatttaatgtagaatattgctttttaaaataatgtttttattttgctgtagaaaaataaaaaaaaatttgattataaaaaaaaaaaaaaaaaaaaaaaaaaaaa

SEQ ID NO: 319 - DNA, 2612 bp, Homo sapiens
cacgcgtccgccccatctgaggcgtttgttgcagctacctgcacttctagattcatcttcttgtgagccctgggcttaggagtcaccatggcaactgaagagttcatcatccgcatccccccataccactatatccatgtgctggaccagaacagcaacgtgtcccgtgtggaggtcgggccaaagacctacatccggcaggacaatgagagggtactgtttgcccccatgcgcatggtgaccgtccccccacgtcactactgcacagtggccaaccctgtgtctcgggatgcccagggcttggtgctgtttgatgtcacagggcaagttcggcttcgccacgctgacctcgagatccggctggcccaggaccccttccccctgtacccaggggaggtgctggaaaaggacatcacacccctgcaggtggttctgcccaacactgccctccatctaaaggcgctgcttgattttgaggataaagatggagacaaggtggtggcaggagatgagtggcttttcgagggacctggcacgtacatcccccggaaggaagtggaggtcgtggagatcattcaggccaccatcatcaggcagaaccaggctctgcggctcagggcccgcaaggagtgctgggaccgggacggcaaggagagggtgacaggggaagaatggctggtcaccacagtaggggcgtacctyccagcggtgtttgaggaggttctggatttggtggacgccgtcatccttacggaaaagacagccctgcacctccgggctcggcggaacttccgggacttcaggggagtgtcccgccgcactggggaggagtggctggtaacagtgcaggacacagaggcccacgtgccagatgtccacgaggaggtgctgggggttgtgcccatcaccaccctgggcccccacaactactgcgtgattctcgaccctgtcggaccggatggcaagaatcagctggggcagaagcgcgtggtcaagggagagaagtcttttttcctccagccaggagagcagctggaacaaggcatccaggatgtgtatgtgctgtcggagcagcaggggctgctgctgagggccctgcagcccctggaggagggggaggatgaggagaaggtctcacaccaggctggggaccactggctcatccgcggacccctggagtatgtgccatctgccaaagtggaggtggtggaggagcgccaggccatccctctagacgagaacgagggcatctatgtgcaggatgtcaagaccggaaaggtgcgcgctgtgattggaagcacctacatgctgacccaggacgaagtcctgtgggagaaagagctgcctcccggggtggaggagctgctgaacaaggggcaggaccctctggcagacaggggtgagaaggacacagctaagagcctccagcccttggcgccccggaacaagacccgtgtggtcagctaccgcgtgccccacaacgctgcggtgcaggtgtacgactaccgagagaagcgagcccgcgtggtcttcgggcctgagctggtgtcgctgggtcctgaggagcagttcacagtgttgtccctctcagctgggcggcccaagcgtccccatgcccgccgtgcgctctgcctgctgctggggcctgacttcttcacagacgtcatcaccatcgaaacggcggatcatgccaggctgcaactgcagctggcctacaactggcactttgaggtgaatgaccggaaggacccccaagagacggccaagctcttttcagtgccagactttgtaggtgatgcctgcaaagccatcgcatcccgggtgcggggggccgtggcctctgtcactttcgatgacttccataagaactcagcccgcatcattcgcactgctgtctttggctttgagacctcggaagcgaagggccccgatggcatggccctgcccaggccccgggaccaggctgtcttcccccaaaacgggctggtggtcagcagtgtggacgtgcagtcagtggagcctgtggatcagaggacccgggacgccctgcaacgcagcgtccagctggccatcgagatcaccaccaactcccaggaagcggcggccaagcatgaggctcagagactggagcaggaagcccgcggccggcttgagcggcagaagatcctggaccagtcagaagccgagaaagctcgcaaggaacttttggagctggaggctctgagcatggccgtggagagcaccgggactgccaaggcggaggccgagtcccgtgcggaggcagcccggattgagggagaagggtccgtgctgcaggccaagctaaaagcacaggccttggccattgaaacggaggctgagctccagagggtccagaaggtccgagagctggaactggtctatgcccgggcccagctggagctggaggtgagcaaggctcagcagctggctgaggtggaggtgaagaagttcaagcagatgacagaggccataggccccagcaccatcarggaccttgctgtggctgggcctgagatgcaggtaaaactgctccagtccctgggcctgaaatcaaccctcatcaccgatggcttcamttccatcaacttctt

SEQ ID NO: 320 - DNA, 943 bp, Homo sapiens
  misc_feature (52): n equals a,t,g, or c
  misc_feature (54): n equals a,t,g, or c
gcaccacagcgctccagcctggtcgacagagtgagactccatctcaagaaanantaaaaataaagttgttctctgaagagcaaatgtctcattccagtaatgacccactcagcaggaatatggtggagttcagtccaattcaggtcagccatatccaaaagaccacaagtcattactaagttgagcaaaagagtttttatctattagcagaaagggcctctctggcagcagagattaaaaactggcccaacttcatttccatacttcagggaacagcaaattgaggatttacttatctaggacttgaattccttctttgggaccaagttaataaaagaccaagaaactcctgattaaactggataatgaaggattctgtagacagggctgcacgtatcggctttgtttgacttctcttttctcagttaacatctcagagctagaacattccacattccccagcagcgtgtgggggctgactaaagtttacaattccaactaaaaatcaccctgcttctggcttatctgaatcccttacccaccccaccccaccaccctactcctatttattcagcaccacactacccaggaaatacactagcaaattgtgcaatggaataaaatccacactttagattcttgcaactgtatcatatgtaatagtatcactttttctacattttggtcaaataaataggagtagggtggtggggtggggtgggtaagggattcagataagccagaagcagggtgattttwagttggaattgtaaactttagtcagcccccacacgctgctggggaatgtggatgttctagctctgagatgttaactgrgaaaagagaagtcaaacaaagccgatacgtgcagccctgtctacagaatccttcattatccagtttaataaggagtttcttggtcttttattaacttgggtcgacc

SEQ ID NO: 321 - DNA, 2959 bp, Homo sapiens
  misc_feature (2948): n equals a,t,g, or c
  misc_feature (2956): n equals a,t,g, or c
ccattcccgggtcgacccacgcgtccgctggaaatttggattctccagaaggtggtttcgatgccatcatgcaagttgcagtttgtggatcactgattggctggaggaatgttacacggctgctggtgttttccacagatgccgggtttcactttgctggagatgggaaacttggtggcattgttttaccaaatgatggacaatgtcacctggaaaataatatgtacacaatgagccattattatgattatccttctattgctcaccttgtccagaaactgagtgaaaataatattcagacaatttttgcagttactgaagaatttcagcctgtttacaaggagctgaaaaacttgatccctaagtcagcagtaggaacattatctgcmaattctagcaatgtaattcagttgatcattgatgcatacaattccctttcctcagaagtcattttggaaaacggcaaattgtcagaaggmgtaacaataagttacaaatcttactgcaagaacggggtgaatggaacaggggaaaatggaagaaaatgttccaatatttccattggagatgaggttcaatttgaaattagcataacttcaaataagtgtccaaaaaaggattctgacagctttaaaattaggcctctgggctttacggaggaagtagaggttattcttcagtacatctgtgaatgtgaatgccaaagcgaaggcatccctgaaagtcccaagtgtcatgaaggaaatgggacatttgagtgtggcgcgtgcaggtgcaatgaagggcgtgttggtagacattgtgaatgcagcacagatgaagttaacagtgaagacatggatgcttactgcaggaaagaaaacagttcagaaatctgcagtaacaatggagagtgcgtctgcggacagtgtgtttgtaggaagagggataatacaaatgaaatttattctggcaaattctgcgagtgtgataatttcaactgtgatagatccaatggcttaatttgtggaggaaatggtgtttgcaagtgtcgtgtgtgtgagtgcaaccccaactacactggcagtgcatgtgactgttctttggatactagtacttgtgaagccagcaacggacagatctgcaatggccggggcatctgcgagtgtggtgtctgtaagtgtacagatccgaagtttcaagggcaaacgtgtgagatgtgtcagacctgccttggtgtctgtgctgagcataaagaatgtgttcagtgcagagccttcaataaaggagaaaagaaagacacatgcacacaggaatgttcctattttaacattaccaaggtagaaagtcgggacaaattaccccagccggtccaacctgatcctgtgtcccattgtaaggagaaggatgttgacgactgttggttctattttacgtattcagtgaatgggaacaacgaggtcatggttcatgttgtggagaatccagagtgtcccactggtccagacatcattccaattgtagctggtgtggttgctggaattgttcttattggccttgcattactgctgatatggaagcttttaatgataattcatgacagaagggagtttgctaaatttgaaaaggagaaaatgaatgccaaatgggacacgggtgaaaatcctatttataagagtgccgtaacaactgtggtcaatccgaagtatgagggaaaatgagtactgcccgtgcaaatcccacaacactgaatgcaaagtagcaatttccatagtcacagttaggtagctttagggcaatattgccatggttttactcatgtgcaggttttgaaaatgtacaatatgtataatttttaaaatgttttattattttgaaaataatgttgtaattcatgccagggactgacaaaagacttgagacaggatggttattcttgtcagctaaggtcacattgtgcctttttgaccttttcttcctggactattgaaatcaagcttattggattaagtgatatttctatagcgattgaaagggcaatagttaaagtaatgagcatgatgagagtttctgttaatcatgtattaaaactgatttttagctttacaaatatgtcagtttgcagttatgcagaatccaaagtaaatgtcctgctagctagttaaggattgttttaaatctgttattttgctatttgcctgttagacatgactgatgacatatctgaaagacaagtatgttgagagttgctggtgtaaaatacgtttgaaatagttgatctacaaaggccatgggaaaaattcagagagttaggaaggaaaaaccaatagctttaaaacctgtgtgccattttaagagttacttaatgtttggtaacttttatgccttcactttacaaattcaagccttagataaaagaaccgagcaattttctgctaaaaagtccttgatttagcactatttacatacaggccatactttacaaagtatttgctgaatggggaccttttgagttgaatttattttattatttttattttgtttaatgtctggtgctttctatcacctcttctaatcttttaatgtatttgtttgcaattttggggtaagactttttttatgagtactttttctttgaagttttagcggtcaatttgcctttttaatgaacatgtgaagttatactgtggctatgcaacagctctcacctacgcgagtcttactttgagttagtgccataacagaccactgtatgtttacttctcaccatttgagttgcccatcttgtttcacactagtcacattcttgttttaagtgcctttagttttaacagttcactttttacagtgctatttactgaagttatttattaaatatgcctaaaatacttaaatcggatgtcttgactctgatgtattttawcaggttgtgtgcatgaaatttttatagataaagragttgaggaaanaaaaaaanaaa

SEQ ID NO: 322 - DNA, 802 bp, Homo sapiens
ggcacagctggaggcgcgggagggcagcgagaggttcgcgggtgcagcgcacaggagaccatgtccgggggcagcagctgcagccagaccccaagccgggccatccccgccactcgccgggtggtgctcggcgacggcgtgcagctcccgcccggggactacagcacgacccccggcggcacgctcttcagcaccaccccgggaggtaccaggatcatctatgaccggaaattcctgatggagtgtcggaactcacctgtgaccaaaacacccccaagggatctgcccaccattccgggggtcaccagcccttccagtgatgagccccccatggaagccagccagagccacctgcgcaatagcccagaagataagcgggcgggcggtgaagagtcacagtttgagatggacatttaaagcaccagccatcgtgtggagcactaccaaggggcccctcagggccttcctgggaggagtcccaccagccaggccttatgaaagtgatcatactgggcaggcgttggcgtggggtcggacaccccagccctttctccctcactcagggcacctgccccctcctcttcgtgaacaccagcagatacctccttgtgcctccactgatgcaggagctgccaccccaaggggagtgacccctgccagcacaccctcgcwgcygggggsgcaaccaccccttccttaggttgatgtgcttgggaaagctccctccccctccttccccaagagaggaaataaaagccmccttcgccctagggccaaraaaaaaaaaaaaaaaaaaaaaaaa

SEQ ID NO: 323 - DNA, 1724 bp, Homo sapiens
  misc_feature (1590): n equals a,t,g, or c
  misc_feature (1650): n equals a,t,g, or c
  misc_feature (1701): n equals a,t,g, or c
gcagcctgccagccgcgctgctgctgctcctcctgctgtgggaccgctgaccgcgcggctgctccgctctccccgctccaagcgccgatctgggcacccgccaccagcatggacgctcgccgcgtgccgcagaaagatctcagagtaaagaagaacttaaagaaattcagatatgtgaagttgatttccatggaaacctcgtcatcctctgatgacagttgtgacagctttgcttctgataattttgcaaacacgaggctgcagtcagttcgggaaggctgtaggacccgcagccagtgcaggcactctggacctctcagggtggcgatgaagtttccagcgcggagtaccaggggagcaaccaacaaaaaagcagagtcccgccagccctcagagaattctgtgactgattccaactccgattcagaagatgaaagtggaatgaattttttggagaaaagggctttaaatataaagcaaaacaaagcaatgcttgcaaaactcatgtctgaattagaaagcttccctggctcgttccgtggaagacatcccctcccaggctccgactcacaatcaaggagaccgcgaaggcgtacattcccgggtgttgcttccaggagaaaccctgaacggagagctcgtcctcttaccaggtcaaggtcccggatcctcgggtcccttgacgctctacccatggaggaggaggaggaagaggataagtacatgttggtgagaaagaggaagaccgtggatggctacatgaatgaagatgacctgcccagaagccgtcgctccagatcatccgtgacccttccgcatataattcgcccagtggaagaaattacagaggaggagttggagaacgtctgcagcaattctcgagagaagatatataaccgttcactgggctctacttgtcatcaatgccgtcagaagactattgataccaaaacaaactgcagaaacccagactgctggggcgttcgaggccagttctgtggcccctgccttcgaaaccgttatggtgaagaggtcagggatgctctgctggatccgaactggcattgcccgccttgtcgaggaatctgcaactgcagtttctgccggcagcgagatggacggtgtgcgactggggtccttgtgtatttagccaaatatcatggctttgggaatgtgcatgcctacttgaaaagcctgaaacaggaatttgaaatgcaagcataatatctggaaaatttgctgcctgccttctacttctcaaatctttcttgtaaaagtttccaattttttcactgaaacctgagttaaaaatcttgatgatcagcctgtttcataagaaactccaatcaagttaatcttagcagacatgtgtttctggagcatcacagaaggtatattgctagttacactttgccctcctgcagtttcttctctgctcccaacccccatctcatagcatccccctctatttccaatgctcctctccaaccgcttagtttctgaatttcttttaaattacagttttatgaaagcatattttatttacttggtgttgaaatagccctyataaaacctaagcacttggaaacncaataatagtattaactaactagatctattgaatttcagagaagagcctaaatagcaaantttacacaaaaacgagtatgatttagcactcatactagttgagggtttggngccgatagcgactgctaatgaac

SEQ ID NO: 324 - DNA, 2261 bp, Homo sapiens
  misc_feature (1098): n equals a,t,g, or c
cccagatggtaggccaacaggggacgcttttgtcctctttgcctgtgaggaatatgcacagaatgcgttgaggaagcataaagacttgttgggtaaaagatacattgaactcttcaggagcacagcagctgaagttcagcaggtgctgaatcgattctcctcggcccctctcattccacttccaacccctcccattattccagtactacctcagcaatttgtgccccctacaaatgttagagactgtatacgccttcgaggtcttccctatgcagccacaattgaggacatcctggatttcctgggggagttcgccacagatattcgtactcatggggttcacatggttttgaatcaccagggccgcccatcaggagatgcctttatccagatgaagtctgcggacagagcatttatggctgcacagaagtgtcataaaaaaaacatgaaggacagatatgttgaagtctttcagtgttcagctgaggagatgaactttgtgttaatggggggcactttaaatcgaaatggcttatccccaccgccatgcctgtctcctccctcctacacatttccagctcctgctgcarttattcctacaraarctgccatttaccagccctctgtgattttgaatccacgagcactgcagccctycacagcgtactacccagcaggcactcagctcttcatgaactacacagcgtactatcccagtgtttgaaagatgtatggtgatcttgaaacctccagacacaagaaaacttctagcaaattcaggggaagtttgtctacactcaggctgcagtattttcagcaaacttgattggacaaacgggcctgtgccttatcttttggtggagtgaaaaaatttgagctagtgaagccaaatcgtaacttacagcaagcagcatgcagcatacctggctctttgctgattgcaaataggcatttaaaatgtgaatttggaatcagatgtctccattacttccagttaaagtggcatcataggtgtttcctaagttttaagtcttggataaaaactccaccagtgtctaccatctccaccatgaactctgttaaggaagcttcattttngtatattcccgctcttttctcttcatttccctgtcttctgcataatcatgccttcttgctaagtaattcaagcataagatcttggaataataaaatcacaatcttaggagaaagaataaaattgttattttcccagtctcttggccatgatgatatcttatgattaaaaacaaattaaattttaaaacacctgaagatawattagaagaaattgtgcaccctccacaaaacatacaaagtttaaaagtttggatctttttctcagcaggtatcagttgtaaataatgaattaggggccaaaatgcaaaacgaaaaatgaagcagctacatgtagttagtaatttctagtttgaactgtaattgaatattgtggcttcatatgtattattttatattgtacttttttcattattgatggtttggactttaataagagaaattccatagtttttaatatcccagaagtgagacaatttgaacagtgtattctagaaaacaatacactaactgaacagaagtgaatgcttatatatattatgatagccttaaacctttttcctctaatgccttaactgtcaaataattataaccttttaaagcataggactatagtcagcatgctagactgagaggtaaacactgatgcaattagaacaggtactgatgctgtcagtgtttaacactatgtttagctgtgtttatgctataaaagtgcaatattagacactagctagtactgctgcctcatgtaactccaaagaaaacaggatttcattaagtgcattgaatgtggmtatttctctaagttactcatattgtcctttgcttgaatgcaatgccgtgcagatttatgwggctgctatttttattttctgtgcattactttaacaccttaaagggagaagcaaacatttccttcttcagctgactggcaatggccctttaactgcaataggaagaaaaaaaaaaaggtttgtgtgaaaattggtgataactggcacttaagatcgaaaagaaatttctgtatacttgatgccttaagatgcccaaagctgcccaaagctctgaaagactttaagataggcagtaatgcttactacaatactactgagtttttgtagagttaacatttgataataaaacttgcctgtttaatctcaaaa

SEQ ID NO: 325 - DNA, 1213 bp, Homo sapiens
  misc_feature (1213): n equals a,t,g, or c
tggacgcgtgggtcgacccacgcgtccggtcaaaaytaaccccctaataaaattaattaaccactcattcatcgacctccccaccccatccaacatctccgcatgatgaaacttcggctcactccttggcgcctgcctgatcctccaaatcaccacaggactattcctagccatgcactactcaccagacgcctcaaccgccttttcatcaatcgcccacatcactcgagacgtaaattatggctgaatcatccgctaccttcacgccaatggcgcctcaatattctttatctgcctcttcctacacatcgggcgaggcctatattacggatcatttctctactcagaaacctgaaacatcggcattatcctcctgcttgcaactatagcaacagccttcataggctatgtcctcccgtgaggccaaatatcattctgaggggccacagtaattacaaacttactatccgccatcccatacattgggacagacctagttcaatgaatctgaggaggctactcagtagacagtcccaccctcacacgattctttacctttcacttcatcttgcccttcattattgcagccctagcagcactccacctcctattcttgcacgaaacgggatcaaacaaccccctaggaatcacctcccattccgataaaatcaccttccacccttactacacaatcaaagacgccctcggcttacttctcttccttctctccttaatgacattaacactattctcaccagacctcctaggcgacccagacaattataccctagccaaccccttaaacacccctccccacatcaagcccgaatgatatttcctattcgcctacacaattctccgatccgtccctaacaaactaggaggcgtccttgccctattactatccatcctcatcctagcaataatccccatcctccatatatccaaacaacaaagcataatatttcgcccactaagccaatcactttattgactcctagccgcagacctcctcattctaacctgaatcggaggacaaccagtaagctacccttttaccatcattggacaagtagcatccgtactatacttcacaacaatcctaatcctaataccaactatctccctaatkgaaaacaaaatactcaaatgggcctaaaaaaaaaaaaaaaaaacycgggggggggccgggtwcccaatttcccccctaggn

SEQ ID NO: 326 - DNA, 2764 bp, Homo sapiens
  misc_feature (372): n equals a,t,g, or c
  misc_feature (2128): n equals a,t,g, or c
gccggagcaaggctgagctgctccgcagcatcgccaagaggaaggagcgcctggccatcctggacagtcaggctgggcagatccgggctcaggccgtkcargartcagaacgcctggcccgggacaagaatgcctccttacagctgctgcaaaaggagaaggagaagctgactgtgctggaaaggagataccactcactcacagggggcaggcctttcccgaagaccacatcgaccctcaaagaggtttaccgctccaagatggatggcgaggccaccagcccccttccccggacccgcagcggcccctcccctcctcctctggctcttcctcctcctcctcccagctcagcgtggctaccctggggcgtancycckccccaaagagcgctctactcacccagaatggcacgggcagccttcctcgcaacctggcagccacactgcaggacatcgagaccaagcgccaactagctctgcagcagaagggacaacaagtgattgaagagcagcggcggcgactggctgagctgaagcagaaagcggcagtgaggcacagtgccagtgggatgcccttcacggggcagcacccttcccagcgggcccctcgggcttcccccctctcatgcaccactctatcctacaccacctgcctgcggggcgggagcgtggggaggagggtgagcacgcctatgatacgctgagtctggagagctctgacagcatggagaccagcatctccaccgggggcaactcggctgctcccctgacaacatgtccagcgcgagtggtctggacatggggaagatcgaggagatggagaagatgctgaaagaggctcatgcagagaagaaccggctcatggagtcgagggagcgggagatggagctgcggcggcaggccctggaggaggagcggcggaggcgtkacaggtagaacggaggctgcagagtgagagtgcccggaggcagcagctggtcgagaaggaggtcaagatgcgggagaaacaattttcccaggcacgacccctgacccgctacctgccaatccggaaggaggactttgacctgaagacacatattgagtcmtcgggccatggtgttgatacctgcctgcacgtggtgctcagcagcaaggtctgccgtggctacttggtcaagatgggcggcaagattaaatcatggaagaarcgctggtttgtcttcgaccggctcaagcgcaccctttcctattatgtggacaagcatgagacgaagctgaaaggagtcatctatttccargccattgaaggaagtgtactacgaccacctgcgccagtgcagccaagaagaggtttttccgcttccactatggtgactgagaagcccgaacccagccctcaccttctgcgtaaagacccatgaccggctgtaytacatggtggccccatctgcagaggccatgcgtatctggatggatgtcattgtcacaggggctgagggctacactcagttcatgaactaactgccgtgggcctcctggcagagcacaactggggcttttgtataagaagactttaatattctgtaaggagcttggtcctgtgagtttctgggctctggcctcctgaagaaccagccagaagaagaaaagtagaggtggctttgctgcctcctgggagcccagaacttgcagtaaccctttaggtcctgccccaggcccagccagggctgaggagctgtcacagagagggcctcagctctgacctgacacctgctctccccagcctgttttctcttttctaaaagacaaattatggtaccataagctgccaaagatcccctcctgcctcagacccctttgccaggggctttgggggctgagcagagccacatccagagtggggtaatagctcaggcggcccgcttcccatttctcaaaccccgctctgccccattgttctcctttcccttatactttttattaccttgctcaagggccagagatctcaagtgtcaaccttgaggtcccagctccatcccctagttgcagactcatcaccatggttaccatagtgactgcttcattgccatggttacatactaattgctgcagctctgtggcccagcccactgcttcagctgtgggcnatctgagggtacgtgccatcatctctccagcccaggcccctgggcatctcatgctggggggaagggactgaatacctttttccttccccctgcctgtgtcttcagccctgatgcacaggctgccagccccccagtccagccctctcccttccactggtgccttgcttagagccagaagggatgaagccgggggatctatggaacagaggaggagcgatgcagttgggagaggaagctagaagggttatggttggagttctgtacagtgttgagtttccgacagggaaagaggattcctccaatgctcctagagagaaagcctgagcaggagatgatgcagcagaggggaagggccctgtggtgccgccgcccttccttcagcctccgaagggtgatggaaatggagagtggaggaccaggcctccagctgtctggcctcgcccttcacgccttaacactaagcccacctcccctgctctccttcccagcattgagcccttggttgcctgggcccaggctgggggttttcagtatttgtaagcatttcagcagaacaataaagcctttggactacgraaaaaaaaaaaaaaaaaaaaaaaaaaaaaaaaaaaaaaaaaaaaaaaaaaagggaggggc

SEQ ID NO: 327 - DNA, 1764 bp, Homo sapiens
  misc_feature (1398): n equals a,t,g, or c
  misc_feature (1758): n equals a,t,g, or c
  misc_feature (1759): n equals a,t,g, or c
  misc_feature (1762): n equals a,t,g, or c
ggacatcaaagatgaggagcctggagactttgggccgaccgaagcctgaatgtgagggttacgaccccaacgccctgtattgcatttgccgccagcctcacaacaacaggtttatgatttgctgtgaccgctgtgaagaatggtttcatggcgattgtgtgggcatttctgaggctcgagggaggcttttggaaaggaatggggaagactatatctgcccaaactgcaccattctgcaagtgcaggatgagactcattcagaaacggcagatcagcaggaagctaaatggagacctggagatgctgatggcaccgattgtacaagtataggaacaatagagcagaagtctagcgaagaccaagggataaagggtagaattgagaaagctgcaaatccaagtggcaagaagaaactcaagatcttccagcctgtgatagaggcgcctggtgcctcaaaatgtattggccccgggtgctgtcacgtggcgcacccgactcggtgtactgcagtaatgactgtatcctcaaacacgccgcagcgacaatgaagtttctaagctcaggtaaagaacagaagccaaagcctaaagaaaagatgaagatgaagccagagaagcccagtcttccgaaatgcggtgctcaggcaggtattaaaatctcttctgtgcacaagagaccagctccagaaaaaaaagagaccacagtgaagaaggcagtggtggtccctgcgcggagtgaagcactcgggaaggaagcagcttgtgagagcagcacgccgtcgtgggcgagcgatcacaattacaatgcagtaaagccagaaaagactgctgctccctcgccgtcactgttgtataaatgtatgtatcacctaggggttggcctcctggacccctcccgttctttctggatagccatcccctgggcctgtccaggactgggagttgcagctttgtgttaagctgatcacagacaccggctgcaccatcagcgggaagcagagcccatgtccaggatgcctcctgctgccctgtgtccatccctagtctgtcaggacttcctgtcactgttttccaaagctgtaaacctcactggtgaacgttcaccttaatgattgattctttaatctctgttttcactctcaggctctggtaagtattcgtattctcttcatcccagtctgattgcatagccacactgcccggcacgccacatccacccctgtctgcacatgagttgttctgacaacagcgctgtatacgcttcagtttttccacattgtccacggccagcacatgaaagcatcacttcttttttatgttgtgggaatctttgcaagttagtgttgcatctgattttcaggtgtacatttatttttgactgggcagataggggattttnttttttccatgtccgattcacacgctacacacccacatgaacacattcgaacttcgaaggccacacactcctgcttcataggccccacggtaagtgagttcacacctagaacactgtcctgaccgcaggacgcgtgccttggacttggtattctacatgtgactggctttcttgccctcgtctcttgaatgtttagactcttaagatcatatcctgccccaaatttcaaattaatgaaatgaagatatttcaaacagatctttgaaacctcagattctgtggtgcaattttaatgttttcttgtttctcagttttctgctataaaactattttcaattcagtctttaaaaaaaaaaaaanntcnaa

SEQ ID NO: 328 - DNA, 571 bp, Homo sapiens
  misc_feature (7): n equals a,t,g, or c
  misc_feature (535): n equals a,t,g, or c
gcccaantactttccagcccagtaaggggtatttcaggagagcagtccactkaaggttctttccctttaagatatgtgcaggatcaagttgcggcaccttttcagctgagtaaccacactggccgcatcaaggtggtctttactccgagcatctgtaaagtgacctgcaccaagggcagctgtcagaacagctgtgagaaggggaacaccaccactctcattagtgagaatggtcatgctgccgacaccctgacggccacgaacttccgagtggtaatttgccatcttccatgtatgaatggtggccagtgcagttcaagggacaaatgtcagtgccctccaaatttcacaggaaaactttgtcagatcccagtccatggtgccagcgtgcstaaactttatcagcattcccagcagccaggcaaggcattggggacgcatgtcatccattcaacacataccttgcctctgaccgtgactagccagcaggagtcaaagtgaaatttcctccttaacatagtcaatatccatgtgnaacatcctcctgaagcttccgtccagatacatcagg

SEQ ID NO: 329 - DNA, 473 bp, Homo sapiens
  misc_feature (37): n equals a,t,g, or c
  misc_feature (449): n equals a,t,g, or c
  misc_feature (467): n equals a,t,g, or c
cacgtagtaatctttaaatataaatagccacgtgtgnactactatcatatgggacagaacagttccagaccacattattgataagatgtgttaaaataaataagatctttctgtgaacttttgggaaccaaatggttttgggcatgatttcccagctcattatatattgacacagaattttttcagaatggcatttactagtaccccagaaatttagcaaagtatagttaggtacttattgtaaaatatattgcatatttgatttaaggtttgttatgaacacactaatctgatattttatatttaaaccattttcaatkctgtaagactcagtaagagctatttaattatactgwaacaaagaaaatctataaataaatagcacaaataggcacatgcgggtgtataatactgaagtggtagtttttaatttccgaagagaataagcntttcaggcccattagaancacaga

SEQ ID NO: 330 - DNA, 1335 bp, Homo sapiens
  misc_feature (865): n equals a,t,g, or c
  misc_feature (1004): n equals a,t,g, or c
  misc_feature (1156): n equals a,t,g, or c
  misc_feature (1301): n equals a,t,g, or c
  misc_feature (1328): n equals a,t,g, or c
  misc_feature (1333): n equals a,t,g, or c
ggcgctactgaggccgcggaccggactgcggttggggcgggaagagccggggccgtggctgacatggagcagccctgctgctgaggccgcgccctccccgccctgaggtgggggcccaccaggatgagcaagctgcccagggagctgacccgagacttggagcgcagctgcctgccgtggcctccctgggctcctcactgtcccacagccagagcctctcctcgcacctccttccgccgcctgagaagcgaagggccatctctgatgtccgccgcaccttctgtctcttcgtcaccttcgacctgctcttcatctccctgctctggatcatcgaactgaataccaacacaggcatccgtaagaacttggagcaggagatcatccagtacaactttaaaacttccttcttcgacatctttgtcctggccttcttccgcttctctggactgctcctaggctatgcgtgctgcrgctccggcactggtgggtgattgcggtcacgacgctggtgtccagtgcattcctcattgtcaaggtcatcctctctgagctgctcagcaaaggggcatttggctacctgctccccatcgtctcttttgtcctcgcctggttggagacctggttccttgacttcaaagtcctaccccaggaagctgaagaggagcgatggtatcttgccgcccaggttgctgttgcccgtggacccctgctgttctccggtgstctgtccgagggacattctattcacccccagaatcctttgcagggtctgacaatgaatcagatgaagaagttgctgggaagaaaagtttctctgctcaggagcgggagtacatccgccaggggaaggaggccacggcagtgntggaccagatcttggcccaggaagagaactggaagtttgagaagaataatgaatatggggacaccgtgtacaccattgaagttccctttcacggcaagacgtttatcctgaagaccttcctgccctgtcctgcggastncgtgtaccaggaggtgatcctgcagcccgagaggatggtgctgtggaacaagacagtgactgcctgccagatcctgcagcgagtggaagacaacaccctcatctcctatgacgtgtctgcaaggggctgcgggcggcgtkgtcttccccaanggacttcgtgaatgtccggcgcattgarcggcgcagggaccgatacttgttcatcagggatcgccaccttcacacagtgccaagcccccgacgcacaaatatgttccggggagagaatggcctgggggtttcatcgtggttcaantcggccattaaccccctgttttgcacnttgtntg

SEQ ID NO: 331 - DNA, 1046 bp, Homo sapiens
  misc_feature (982): n equals a,t,g, or c
  misc_feature (997): n equals a,t,g, or c
ggtaaaacagagagcaacatgccccagtccctctctctggccagttcttgtggcagccccattggcctggagacatggttttttgtggttgcagctgcagctgtccccccgtcttttaactcgacatcaaaagcctctctcctgccagtgccataggtttgttagagctactgttttgtaacagctgctcaggtgtccccaaactcctggagttttccaccctgagctgttaaaaacctgccctgcctgtcacccatttctgtgccaccagcccaccccctgcctccactctcctccctgccaccttctgtccctgccataggaatatggggacaccgtgtacaccattgaagttccctttcacggcaagacgtttatcctgaagaccttcctgccctgtcctgcggagctcgtgtaccaggaggtgatcctgcagcccgagaggatggtgctgtggaacaagacagtgactgcctgccagatcctgcagcgagtggaagacaacaccctcatctcctatgacgtgtctgcaggggctgcgggcggcgtggtctccccaagggacttcgtgaatgtccggcgcattgagcggcgcagggaccgatacttgtcatcagggatcgccacctcacacagtgccaagcccccgacgcacaaatatgtccggggagagaatggccctgggggcttcatcgtgctcaagtcggccagtaacccccgtgtttgcacctttgtctggattcttaatacagatctcaagggccgcctgccccggtacctcatccaccagagcctcgcggccaccatgtttgaatttgcctttcacctgcgacascgcatcagcgagctgggggcccgggcgtgactgtgccccctcccaccctgcgggccagggtcctgtcgccaccacttccagagccagaaagggtgccagttgggctcgcactgcccacatgggacctggccccaggcwgtmamcctncamcgagccacgcantcctgggagttgatgaytgaacagstttgggtggacattggattcgggg

SEQ ID NO: 332 - DNA, 1311 bp, Homo sapiens
  misc_feature (1280): n equals a,t,g, or c
ggcggcaccagcggcggcgctctgtgtggagaagcaggggcwgctgctgccgctgctgctgcacgaatcgccgcagcccccagccttgcgcgtcgtcgctacctcctcggacaggtgagaagcagcccagaaattttatgaataagcatcagaagccagtgctaacaggccagcggttcaaaactcggaaaagggatgaaaaagagaaattcgaacccacagtcttcagggatacacttgtccaggggcttaatgaggctggtgatgaccttgaagctgtagccaaatttctggactctacaggctcaagattagattatcgtcgctatgcagacacactcttcgatatcctggtggctggcagtatgcttgcccctggaggaacgcgcatagatgatggtgacaagaccaagatgaccaaccactgtgtgttttcagcaaatgaagatcatgaaaccatccgaaactatgctcaggtcttcaataaactcatcaggagatataagtatttggagaaggcatttgaagatgaaatgaaaaagcttctcctcttccttaaagccttttccgaaacagagcagacaaagttggcgatgctgtcggggattctgctgggcaatggcaccctgcccgccaccatcctcaccagtctcttcaccgacagcttagtcaaagaaggcattgcggcctcatttgctgtcaagcttttcaaagcatggatggcagaaaaagatgccaactctgttacctcgtctttgagaaaagccaacttagacaagaggctgcttgaactctttccagttaacagacagagtgtggatcattttgctaaatacttcactgacgcaggtcttaaggagctttccgacttcctccgagtccagcagtccctgggcaccaggaaggaactgcagaaggagctccaggagcgtctttctcaggaatgcccgatcaaggaggtggtgctttatgtcaaagaagaaatgaagaggaatgatcttccagaaacagcagtgattggtcttctgtggacatgtataatgaacgctgttgagtggaacaagaaggaagaacttgttgcagagcaggctctgaagcacctgaagcaatatgctcccctgctggccgtgttcagctcccaaggccagtcagagctgatcctcctccagaaggttcaggaatactgctacgacaacatccatttcatgaaagcctttcagaagattgtgcttccttataccatttcagtattgcttcttcgctcagaacatcagctttantcgtgccgattcggcacgagcggcacgagcc

SEQ ID NO: 333 - DNA, 1444 bp, Homo sapiens
ggcagagcccggcctcttggtactgctgaccccagccaggctacagggatcgattggagctgtccttggggctgtaattggccccagctgagcagggcaaacactgaggtcaactacaagccacaggccccttccccagcctcagttcacagctgccctgttgcagggaggcggtggcccttctgttgctagaccgagcctgtgggatataccaaggcagaggagcccatagccatgaggagcctcggggccctgctcttgctgctgagcgcctgcctggcggtgagcgctggccctgtgccaacgccgcccgacaacatccaagtgcaggaaaacttcaatatctctcggatctatgggaagtggtacaacctggccatcggttccacctgcccctggctgaagaagatcatggacaggatgacagtgagcacgctggtgctgggagagggcgctacagaggcggagatcagcatgaccagcactcgttggcggaaaggtgtctgtgaggagacgtctggagcttatgagaaaacagatactgatgggaagtttctctatcacaaatccaaatggaacataaccatggagtcctatgtggtccacaccaactatgatgagtatgccattttcctgaccaagaaattcagccgccatcatggacccaccattactgccaagctctacgggcgggcgccgcagctgagggaaactctcctgcaggacttcagagtggttgcccagggtgtgggcatccctgaggactccatcttcaccatggctgaccgaggtgaatgtgtccctggggagcaggaaccagagcccatcttaatcccgagagtccggagggctgtgctaccccaagaagaggaaggatcagggggtgggcaactggtaactgaagtcaccaagaaagaagattcctgccagctgggctactcggccggtccctgcatgggaatgaccagcaggtatttctataatggtacatccatggcctgtgagactttccagtacggcggctgcatgggcaacggtaacaacttcgtcacagaaaaggagtgtctgcagacctgccgaactgtggcggcctgcaatctccccatagtccggggcccctgccgagccttcatccagctctgggcatttgatgctgtcaaggggaagtgcgtcctcttcccctacgggggctgccagggcaacgggaacaagttctactcagagaaggagtgcagagagtactgcggtgtccctggtgatggtgatgaggagctgctgcgcttctccaactgacaactggccggtctgcaagtcagaggatggccagtgtctgtcccggggtcctgtggcaggcagcgccaagcaacctgggtccaaataaaaactaaattgtaaactcctgaaaaaaaaaaaaaaaaaaaaaaaaaaaaaaaaaaaaaaaagg

SEQ ID NO: 334 - DNA, 1030 bp, Homo sapiens
  misc_feature (59): n equals a,t,g, or c
  misc_feature (989): n equals a,t,g, or c
  misc_feature (1006): n equals a,t,g, or c
  misc_feature (1023): n equals a,t,g, or c
tagaattcggagaagctgaagcttagtgttctaaacggtggttgggaagggggaaggangacctcatggacgtgcctgggggtgtggcttggcttcccttgattttggccggtggatgacgctgtcctgaccacacccactccttgctgcagccrtgkagtcttccactttcgccttggtgcctgtcttcgcccacctgagcatcctccagagcctcgtgccagctgctggtgcagcctctcctgttgccatcagtgcccagcacctgtgctacagccatgtcactcctggcgaccctggggctggagctggacagggccctgctcccagctagtgggctgggatggctcgtagactatgggaaactccccccggcccctgcccccctggctccctatgaggtccttgggggagccctggagggcgggcttccagtggggggagagcccctggcaggtgatggcttctctgactggatgactgagcgagttgatttcacagctctcctccctctggagcctcccytaccccccggcaccctcccccaaccttccccaaccccacctgacctggaagctatggcctccctcctcaagaaggagctggaacagatggaagacttcttcctagatgccccgctcctcccaccaccctccccgccgccactaccaccaccaccactaccaccagccccctccctccccctgtccctcccctcctttgacctcccccagccccctgtcttggatactctggacttgctggccatctactgccgcaacgaggccgggcaggaggaagtggggatgccgcctctgcccccgccacagcagccccctcctccttctccacctcaaccttctcgcctgggccccctacccacatcctgccaccacccgaggggaccgcaagcaaaagaagagagaccagaacaagtcggcggytytgaggtaccgccagcggaagggggcaggaggggttgagggcynkgggaaggggaagttgncagggggttgggaaggnaagggaa

SEQ ID NO: 335 - DNA, 2127 bp, Homo sapiens
  misc_feature (72): n equals a,t,g, or c
  misc_feature (2098): n equals a,t,g, or c
  misc_feature (2114): n equals a,t,g, or c
  misc_feature (2117): n equals a,t,g, or c
ggatctgaggaaagggagggcttttctgatctctcccaattagaggattaggcaattggcagcgcagtgcgntaactctgggcggggctgggctccagggctggacagcacagtccctctgaactgcacagagacctcgcagccccgagaactgtcgcccttccacgatgtggctccgtgcctttatcctggccactctctctgcttccgcggcttgggcagggcatccgtcctcgccacctgtggtggacaccgtgcatggcaaagtgctggggaagttcgtcagcttagaaggatttgcacagcctgtggccattttcctgggaatcccttttgccaagccgcctcttggacccctgaggtttactccaccgcagcctgcagaaccatggagctttgtgaagaatgccacctcgtaccctcctatgtgcacccaagatcccaaggcggggcagttactctcagagctatttacaaaccgaaaggagaacattcctctcaagctttctgaagactgtctttacctcaatatttacactcctgctgacttgaccaagaaaaacaggctgccggtgatggtgtggatccacggaggggggctgatggtgggtgcggcatcaacctatgatgggctggcccttgctgcccatgaaaacgtggtggtggtgaccattcaatatcgcctgggcatctggggattcttcagcacaggggatgaacacagccgggggaactggggtcacctggaccaggtggctgccctgcgctgggtccaggacaacattgccagctttggagggaacccaggctctgtgaccatctttggagagtcagcgggaggagaaagtgtctctgttcttgttttgtctccattggccaagaacctcttccaccgggccatttctgagagtggcgtggccctcacttctgttctggtgaagaaaggtgatgtcaagcccttggctgagcaaattgctatcactgctgggtgcaaaaccaccacctctgctgtcatggttcactgcctgcgacagaagacggaagaggagctcttggagacgacattgaaaatgaaattcttatctctggacttacagggagaccccagagagagtcaaccccttctgggcactgtgattgatgggatgctgctgctgaaaacacctgaagagcttcaagctgaaaggaatttccacactgtcccctacatggtcggaattaacaagcaggagtttggctggttgattccaatgcagttgatgagctatccactctccgaagggcaactggaccagaagacagccatgtcactcctgtggaagtcctatccccttgtttgcattgctaaggaactgattccagaagccactgagaaatacttaggaggaacagacgacactgtcaaaaagaaagacctgttcctggacttgatagcagatgtgatgtttggtgtcccatctgtgattgtggcccggaaccacagagatgctggagcacccacctacatgtatgagtttcagtaccgtccaagcttctcatcagacatgaaacccaagacggtgataggagaccacggggatgagctcttctccgtctttggggccccatttttaaaagagggtgcctcagaagaggagatcagacttagcaagatggtgatgaaattctgggccaactttgctcgcaatggaaaccccaatggggaagggctgccccactggccagagtacaaccagaaggaagggtatctgcagattggtgccaacacccaggcggcccagaagctgaaggacaaagaagtagctttctggaccaacctctttgccaagaaggcagtggagaagccaccccagacagaacacatagagctgtgaatgaagatccagccggccttgggagcctggaggagcaaagactggggtcttttgcgaaagggattgcaggttcagaaggcatcttaccatggctggggaattgtctggtggtggggggcaggggacagaggccatgaaggagcaagttttgtatttgtgacctcagctttgggaataaaggatcttttgaaggccaaaaaaaaaaaaaaagggcgcccttttangggttcccaatttacnaangggtgcttgg

SEQ ID NO: 336 - DNA, 847 bp, Homo sapiens
  misc_feature (291): n equals a,t,g, or c
  misc_feature (334): n equals a,t,g, or c
  misc_feature (829): n equals a,t,g, or c
  misc_feature (847): n equals a,t,g, or c
ccgccatgccgttcctggagctggacacgaatttgcccgccaaccgagtgcccgcggggctggagaaacgactctgcgccgccgctgcctccatcctgggcaaacctgcggacggaccactccccactcctttcctcacgccaagctctgactttccgtgctccacgatcccgcggctccccctccgcacgtctttcccttgtcgccctccccagtcatgacccgggcgtgaccttcagggaccgcggcccgtatcgggatccctgccccgcgaacactgcgcgtttcggntttcgcgcgctcgggtcccgtccccagaggtagcccggccggntccaacttcgggcaaaattttcatgtccccctgcggaccgcgtgaacgtgacggtacggccgggcctggccatggcgctgagcgggtccaccgagccctgcgcgcagctgtccatctcctccatcggcgtagtgggcaccgccgaggacaaccgcagccacagcgcccacttctttgagtttctcaccaaggagctagccctgggccaggaccggatacttatccgctttttccccttggagtcctggcagattggcaagatagggacggtcatgacttttttatgattgggcacggagggatccagggcatctgtgaactggctgcttcttccagagagatctcttggcagagtgagggcctggagataaccagctttggattatcccgcatgcaacattcctgtgatcacataatcctcttcttcatcctcatatgaaataaatgaagagagcttcctcattcaaaaaaaaaaaaaaaaaaccccgggggggnccggtaacccattggccn

SEQ ID NO: 337 - DNA, 702 bp, Homo sapiens
  misc_feature (21): n equals a,t,g, or c
  misc_feature (150): n equals a,t,g, or c
  misc_feature (669): n equals a,t,g, or c
  misc_feature (679): n equals a,t,g, or c
ttttccgccccgctgtatccnatggttccctgtgccttccggctagaactgctcacagtcccgcctcttccgctgcgtgccggaccatggcgcaggggcagcgcaagtttcaggcgcacaaacccgcaaagagtaagacggcagcggcancctctgaaaagaatcggggcccaagaaaaggcggtcgtgttatcgctcccargaaggcgcgcgtcgtgcagcagcaaaagctcaagaagaacctagaagtcggaatccggaagaagatcgaacatgacgtggtgatgaaagccagcagcagcctgcccaagaagctggcactgctgaaggccccagccaagaagaaaggggcagctgccgccacctcctccaagacaccttcctgaggacgctggccccagtgcaggccaacatcccaccccctacctccatatgggaccttgcaagtcatcccacaggctgcactgtcaggaagaggaccctgtcccccagcactgggcttcacctagaacttcagtgggggccaagggtgctgagaacccagcaatgaccaggaagatacagtcactaacttcatctgtccccgtgccccttcccaggtcctgcctccacaggtttaacccagaacaataaacctggctttgtcaamaaaaaaaaaaaagggccggncgttttagangatccagcttacgtaccgtgctt

SEQ ID NO: 338 - DNA, 875 bp, Homo sapiens
  misc_feature (791): n equals a,t,g, or c
  misc_feature (813): n equals a,t,g, or c
  misc_feature (830): n equals a,t,g, or c
  misc_feature (861): n equals a,t,g, or c
taagatagcaaaccagttcgttttaagtaagctaacttgttcattagtatctgtggcttaaaatggcaaaaaagaaaatatccttgagtttgtaatctagttacagaagtaaggcatacacacacacaaagataacagtacctagagagagagtgtgtgtgagtgtgcgtgtctctgtgtgtgcacgtgcacgctcatggccaaatgtgcgcactctacataaaggaggcaggagttcctataggctatttaatgtaagagaaactatttttctcctgttccagctgtatcagatactcgttccgcaacacagaaatgactcagaatctcagacaaaatgtattatttgttcaattttaattttgctactacattcataactcttaaattgttaggctgtttcatttacatcaaagttatctcacaaaagagaaggcaggaaacgttttgtgagtgcctattctatgtcaaacactgtgttggcaccatattttacaagtttttttcctcttctcacagtgatcttgtgagttagttacttatatttttattagaactcattattctgggtaccctccaatgagaattagagaggttaaataccttttcctagattcccacagcaggaaggtgggcatagctgttttgtctgacaccagaacccatctcaccacactgctttacagtcttcctgaagggacattttgaggtgggggggggccttcaaagctcagaggactgggtttkgaatgggtttaatttttgcaagggatccatgtccatgccagggngtttacaattctttaacttccntcccaaattcgtgtgtnccattagggacatttgggttacatccgggcnggggagggtcaggg

SEQ ID NO: 339 - DNA, 1448 bp, Homo sapiens
  misc_feature (1427): n equals a,t,g, or c
  misc_feature (1432): n equals a,t,g, or c
  misc_feature (1440): n equals a,t,g, or c
cagcgccactagcctcattgtgcccaggagttctccaaacccgcgctgcggagtgagtgaccaagttccggccagttcgacctcgaggatccagaggtggagacggtactacctcccagctctgttttccatccccttcaggtccttcctcgggaggcggcgaaggcggtccaccctgcgcgtgatccttyatgcccggcccctgcccctccctccgggtggaacttccccctcaccgccagacttaagctgaggatcgttggatctctggcggggtgcagaactgagcccaggccacagtaccctattcacgctctgtgcttgtgccaagggggcaatggcggcttcctgtgttctactgcacactgggcagaagatgcctctgattggtctgggtacctggaagagtgagcctggtcaggtaaaagcagctgttaagtatgcccttagcgtaggctaccgccacattgattgtgctgctatctacggcaatgagcctgagattggggaggccctgaaggaggacgtgggaccaggcaaggcggtgcctcgggaggagctgtttgtgacatccaagctgtggaacaccaagcaccaccccgaggatgtggagcctgccctccggaagactctggctgacctccagctggagtatctggacctgtacctgatgcactggccttatgcctttgagcggggagacaaccccttccccaagaatgctgatgggactatatgctacgactccacccactacaaggagacttggaaggctctggaggcactggtggctaaggggctggtgcaggcgctgggcctgtccaacttcaacagtcggcagattgatgacatactcagtgtggcctccgtgcgtccagctgtcttgcaggtggaatgccacccatacttggctcaaaatgagctaattgcccactgccaagcacgtggcctggaggtaactgcttatagccctttgggctcctctgatcgtgcatggcgtgatcctgatgagcctgtcctgctggaggaaccagtagtcctggcattggctgaaaagtatggccgatctccagctcagatcttgctcaggtggcaggtccagcggaaagtgatctgcatccccaaaagtatcactccttctcgaatccttcagaacatcaaggtgtttgacttcacctttagcccagaagagatgaagcagctaaatgccctgaacaaaaattggagatatattgtgcctatgcttacggtggatgggaagagagtcccaagggatgcagggcatcctctgtacccctttaatgacccgtactgagaccacagcttcttggcctcccttccagctctgcagctaatgaggtcctgccacaacggaaagagggagttaataaagccattggagcatccaaaaaaaaaaaaaaaaaaanayctngsggccgncaagggaa

SEQ ID NO: 340 - DNA, 843 bp, Homo sapiens
  misc_feature (812): n equals a,t,g, or c
  misc_feature (822): n equals a,t,g, or c
  misc_feature (829): n equals a,t,g, or c
  misc_feature (838): n equals a,t,g, or c
  misc_feature (841): n equals a,t,g, or c
aattcggcacgagctggcctgagaagccaactcagactcagccaacagagattgttgatttgcctcttaagcaagagattcattgcagctcagcatggctcagaccagctcatacttcatgctgatctcctgcctgatgtttctgtctcagagccaaggccaagaggcccagacagagttgccccaggcccggatcagctgcccagaaggcaccaatgcctatcgctcctactgctactactttaatgaagaccgtgagacctgggttgatgcagatctctattgccagaacatgaattcgggcaacctggtgtctgtgctcacccaggccgagggtgcctttgtggcctcactgattaaggagagtggcactgatgacttcaatgtctggattggcctccatgaccccaaaaagaaccgccgctggcactggagcagtgggtccctggtctcctacaagtcctggggcattggagccccaagcagtgttaatcctggctactgtgtgagcctgacctcaagcacaggattccagaaatggaaggatgtgccttgtgaagacaagttctcctttgtctgcaagttcaaaaactagaggcagctggaaaatacatgtctagaactgatccagcaattacaacggagtcaaaaattaaaccggaccatctctccaactcaactcaacctggacactctcttctctgctgagtttgccttgttaatcttcaatagttttacctaccccagtctttggaaccytaaataataaaaataaacatgtttccactaaaaaaaaaaaaaaaaaaaamtcncagggggggnccggtanccaattcgnccnaa

SEQ ID NO: 341 - DNA, 1293 bp, Homo sapiens
gtgctcataactgttaatgaaagcagattcaaagcaacaccaccaccactgaagtatttttagttatataagattggaactaccaagcatgtggctcctggtcagtgtaattctaatctcacggatatcctctgttgggggagaagcaacattttgtgattttccaaaaataaaccatggaattctatatgatgaagaaaaatataagccattttcccaggttcctacaggggaagttttctattactcctgtgaatataattttgtgtctccttcaaaatcattttggactcgcataacatgcacagaagaaggatggtcaccaacaccaaagtgtctcagactgtgtttctttccttttgtggaaaatggtcattctgaatcttcaggacaaacacatctggaaggtgatactgtgcaaattatttgcaacacaggatacagacttcaaaacaatgagaacaacatttcatgtgtagaacggggctggtccacccctcccaaatgcaggtccactgacacttcctgtgtgaatccgcccacagtacaaaatgctyatatastgtcgagacagatgagtaaatatccatctggtgagagagtacgttatsaatgtaggagcccttatgaaatgtttggggatgaagaagtgatgtgtttaaatggaaactggacrgaaccacctcaatgcaaagattctacrggaaaatgtgggccccctccacctattgacaatggggacattacttcattcccgttgtcagtatatgctccagcttcatcagttgagtaccaatgccagaacttgtatcaacttgagggtaacaagcgaataacatgtagaaatggacaatggtcagaaccaccaaaatgcttacatccgtgtgtaatatcccgagaaattatggaaaattataacatagcattaaggtggacagccaaacagaagctttattygagaacaggtgaatcagytgaatttgtgtgtaaacggggatatcgtctttcatcacgttctcacacattgcgaacaacatgttgggatgggaaactggagtatccaacttgtgcaaaaagatagaatcaatcataaartgcacacctttattcagaactttagtattaaatcagttctyaatttcatttttwatgtattgttttactcctttttattcatacgtaaaattttggattaatttgtgaaaatgtaattataagctgagaccggtggctctcttcttaaaagcaccatattaaatcctggaaaactaaaaaaaaaaaaaaaaaactcgc

SEQ ID NO: 342 - DNA, 1273 bp, Homo sapiens
  misc_feature (6): n equals a,t,g, or c
  misc_feature (483): n equals a,t,g, or c
  misc_feature (1247): n equals a,t,g, or c
  misc_feature (1262): n equals a,t,g, or c
gcccangcggccgcgaggcgccgccgccgccgccgcagccgccggagccgcaatgcctaaaggaggaagaaagggaggccacaaaggccgggcgaggcagtatacaagccctgaggagatcgacgcgcagctgcaggctgagaagcagaaggccagggaagaagaggagcaaaaagaaggtggagatggggctgcaggtgaccccaaaaaggagaagaaatctctagactcagatgagagtgaggatgaagaagatgactaccagcaaaagcgcaaaggcgttgaagggctcatcgacatcgagaaccccaaccgggtggcacagacaaccaaaaaggtcacacaactggatctggacgggccaaaggagctttcgaggagagaacgagaagagattgagaagcagaaggcaaaagagcgttacatgaaaatgcacttggccgggaagacagagcaagccaaggctgacctggcccggctggncatcatccggaaacagcgggaggaggctgcccggaagaaggaagaggaaaggaaagcaaaagacgatgccacattgtcaggaaaacgaatgcagtcactctccctgaataagtaactgcgacccgtgggaggagatgccggggacctgggccgcgctgccaggacctctgctgtgtctcgcccaccctgtgccctggcgccgctgcaacagcccctcatggccaggagccccccatggcctggggcctcctcttcatcttggcacagaaattgtttgggggatggggggggggactgggggaggggtagctgctatctttgagacagaaagrkgyagaagagctttcatttgtctggtagatagatagcatgtaagggggtggttgtcccaggaggcagctgctgacaggtttgctacacacagccccggactgtgttgcctgggtgctcattcagagaggggctatcatctgggagcctgtgcccctgggtcctcgagggtcatggcttgtccctggtcagtcctgtctgactgacctcagggcctcacctctctgcccttccctgcccggttcctactcacctggctagggccagtgcccattttcagccctacccattgatcatttcaagaaacctctgtttactgtgtggcacccaggcaaaacatgctccacaaattcaacttgtatatttggcagattaaacttgacattatcgtaaaaaaaaaaaaaaaaatttgggggggggcccggtacccattngggcccttagggggnggtttaaatta

SEQ ID NO: 343 - DNA, 1793 bp, Homo sapiens
  misc_feature (1251): n equals a,t,g, or c
  misc_feature (1267): n equals a,t,g, or c
gcccacgcgtccgcccacgcgtccggcatggacctcagtcttctctgggtacttctgcccctagtcaccatggcctggggccagtatggcgattatggatacccataccagcagtatcatgactacagcgatgatgggtgggtgaatttgaaccggcaaggcttcagctaccagtgtccccaggggcaggtgatagtggccgtgaggagcatcttcagcaagaaggaaggttctgacagacaatggaactacgcctgcatgcccacrccacagagcctcggggaacccacggagtgctggtgggaggagatcaacagggctggcatggaatggtaccagacgtgctccaacaatgggctggtggcaggattccagagccgctacttcgagtcagtgctggatcgggagtggcagttttactgttgtcgctacagcaagaggtgcccatattcctgctggctaacaacagaatatccaggtcactatggtgaggaaatggacatgatttcctacaattatgattactatatccgaggagcaacaaccactttctctgcagtggaaagggatcgccagtggaagttcataatgtgccggatgactgaatacgactgtgaatttgcaaatgtttagatttgccacataccaaatctgggtgaaaggaaaggggccaggggacaggagggtgtccacatatgttaacatcagttggatctcctatagaagtttctgctgctctctttccttctccctgagctggtaactgcaatgccaacttcctgggcctttctgactagtatcacacttctaataaaatccacaattaaaccatgtttctcacttttcacatgtttcatagcaactgctttatatgactgatgatggcttccttgcacaccacatatacagtgcgcatgcttacagccgggcttctggagcaccagctgcagcctggctactgctttttactgcagaatgaactgcaagttcagcatagtggaggggagaggcagaactggaggagaggtgcagtgaaggttctctacagctaagcctgtttgaatgatacgtaggttccccaccaaaagcaggctttctgccctgagggacatcttcccactcccctgctccacatgagccatgcatgcttagcaatccaagtgcagagctctttgctccaggagtgaggagactgggaggtgaaatggggaaatggaagggtttggaggcagagctgaaaacagggttggnaagggatttcctgaanttaraagacaaacgttagcatacccagtaaggaaaatgagtgcaggggccaggggaacccgtgaggatcactctcaaatgagattaaaaacaaggaagcagagaatggtcagagaatgggattcagattgggaacttgtggggatgagagtgaccaggttgaactgggaagtggaaaaaggagtttgagtcactggcacctagaagcctgcccacgattcctaggaaggctggcagacaccctggaaccctggggagctactggcaaactctcctggattgggcctgatttttttggtgggaaaggctgccctggggatcaactttccttctgtgtgtggctcaggagttcttctgcagagatggcgctatctttcctcctcctgtgatgtcctgctcccaaccatttgtactcttcattacaaaagaaataaaaatattaacgttcamwawgctgaaaaaaaaaaaaaaaaaaaaaaaaaaaaaaaaaaaaaaaaaaaaaaaaaaaaaaaaaaaaaaaaaaaaaa

SEQ ID NO: 344 - DNA, 1672 bp, Homo sapiens
  misc_feature (95): n equals a,t,g, or c
  misc_feature (1667): n equals a,t,g, or c
  misc_feature (1668): n equals a,t,g, or c
ctgcgacgcgctccggcccaggtggcggccggccgcccagcctccccgcctgctggcgggagaaaccatctcctctggcgggggtaggggcggantggcgtccgaccacaccggaagaggaagtctaagcgccggaagtggtgggcattctgggtaacgagctatttacttcctgcgggtgcacaggctgtggtcgtctatctccctgttgttcttcccatcggcgaagatggccctggagacggtgccgaaggacctgcggcatctgcgggcctgtttgctgtgttcgctggtcaagactatagaccagtttgaatatgatggttgtgacaattgtgatgcatatctacaaatgaagggtaaccgagagatggtatatgactgcactagctcttcctttgatggaatcattgcgatgatgagtccagaggacagctgggtctccaagtggcagcgagtcagtaactttaagccaggtgtatatgcggtgtcagtcactggtcgcctgccccaaggaatcgtgcgggagctgaaaagtcgaggagtggcctacaaatccagagacacagctataaagacctagcaagatgcaaggctgccagcatctttgctctccacctcctgcctctgcttatttcttgttctggaactaaatgaacagaacttcaaatacttcctaccctccaattcagactcagctgactgttgagagagcagcacatcattttatcattttatcttctttggactacaggtggggtgggagggatttgggttggtggattaacagatggaattgaggagagagtaggatgctgattttcctacccgtggcccaggtctgtgccttccccatgccaaggactctaggtcaaatgtcaataaatatgaacctcgagaaagttctgaaggccatgacacctgccttgcctccctcttccattctcttaggcacagtaatagcttatttgccctataagaaccttcccagagcagcagaggcccttctactccctcttgactgtctcagcctctgggattgcagcctttgtagtgtgcttccttgcttcctatcagagggtgctgatccagaggctcagtaaccccatcaacttggtggccctggtgtctcacacttgtatccttctgccctcgagacctggcacagcagtatcccttgaagaaatcctgaggctttgtagagtgctccttgaccatgtttaataattcttccctcccctgcttgtctattttcttctcttcacggctcttcctataccttaggccagtctcaagcactcactggagacccttgggccttgggcgaccattgagtcctagtctcccttgtttgtgcccctgtaggaggtaggtccttttctctccggcctagtaggggaccttgggtaacatcccatttttcggccaaggtgagttgttttaggataaaaaaatttaccacaaattctcatttaaatttccacagaaatcctgttcgtatccccattttgatttccctaagttccttgttctccctctaaaaagagaatgattgcaccctgcctgtttacctcaggattgttgtgattgtagaaacgaagctatgtgaaaattatataagtattataaaggtgaaatacttttgctctcaaaaaaaaaaaaaaaannttaa

SEQ ID NO: 345 - DNA, 2109 bp, Homo sapiens
agcactagctttgacatccacggtgagctgcagggaagcatcacacaccagccagcatgtgagcagagggaggcagttggggttgaacttcggaactaggccgggtctyctgacagatcacaagacaccccagaggatcttcagcagtcctacttcccattctctatagagctttgaagcttggaacccttccagggtaaacattttctcttgtgctgctyaggacatytggggcctagctcctgggttcctgtctccaagaagcaatgaccttaaactctgagccatactctgtcctcaccagcggctcccatgtttttctgtgtcaggttattaagtacctagtccttgttttctgtctctstcctaagctacctctctgggtccacagaagacttggtagtatagtgagaatggctatacgtgagtacaaacrtggattttccaagggcttgggaamtgattcttgagcccagaagagccamgcctgctttgaggtcttttggagtggagatgcagccctgggaaatttggggagtcagcaggccagtgtgaagcwattggtcctaggagtatatgagcttgctgtttctttgatggaaaatacatgcttctcttgtatactcagaagtgactaagggcaataactcattaatagccatctatccaacttctttactgagtgatgtattccatggggttacctttttcagattattgagttgctctgtaagcactaaaactttttaatcatttttaagaaactttttagattgtattacaaatttgccttaacagtaattagatgttgaatataattttaacattttattaatgacttgggtcatcagttaataccagtactaaaaccatacgaattattggtttattccagaaaatacagtatttgttctatttttaggtagacaatcatttgggatcagagtacattagcatagtaatgctcagtcagacctgttcaagtagtagagcttggagaatgccatgaaatacttatataattaatttgattgcatgaactaagcaattttactaatgaaaaggttgtatatgtgcaagtcacttttttaaaaaccaagaaaaaactttaatagaggaaatcttattcattaatttatttttctgagtaaaaaaacgaaacccaaatctcattttatttcaactgttaaacattttgatctgttgacccataggatcaggatttgggaaccactttactaggaaagagcagatcagtaccatttgtataaaaccggcctcattatgtaagaaagaaaatgttacgtgttttcttctttagcttggttgtgggcacttctacagcaaggaccatatcatattcatctttgcatccctggcacatgcatgagacataagtacttaataaatgcagttgaatggataatgattagtgttatttatggattagaaaaagcatgtttctatttaagtaagctgtaaaaagtattattgaatatttactgtaaatatatgttcacataaaaaaataacttggagggtctttgtgtccctggcatattatcatcttcatggaaagaatccactgtggtttctgtagagtgattggaaaaatggattattttgaggattgaagaaagtgttctttctgcgttgtcactttgttcaacagtaaaactttattctcagtgttcctactctgcattgtttacatttttgacagttttttttratcacctacaatctgtaaagaatgtatatattcttttcagcatctcagtttgaaaagacatgcagttaaacttgaccttttgataatcgctcttacaggtcattgtctgttctaacagcaaattgtaaacatgtgcttcatagatattgtggctctcagtcatcactttgtcctatggtatttattgaatgttcacatactaatggtgcacaggtgtttttttctataaatcttctgactgtcctgtaattcattcttaagctttaacttgaaggtatcgtaattgccggcatttgatgtttagcaataaaagaataaatgtgtaccagcattttatgtttaaaaaaaaaaaaaaaaaactcgagactagtctctct

SEQ ID NO: 346 - DNA, 1714 bp, Homo sapiens
  misc_feature (21): n equals a,t,g, or c
caggcggaggcgtcgcggganctttggggcaccacagagatgcgggtttgcctgcaatgagatttcattctctacatttaaaggacatcctttctgagctgctgtgaataaatttggaatggtactgtatattttcatctaatggagaactagctgtactttgaataaggattgctgcactggacgactttagaacatccctcacaatgtcgtcaacccggagccagaacccccacggcctgaagcagattggcctggaccagatctgggacgacctcagagccggcatccagcaggtgtacacacggcagagcatggccaagtccagatatatggagctctacactcatgtttataactactgtactagtgttcaccagtcaaaccaagcacgaggagctggagttcctccttctaagtcgaaaaaggggcagacacctggaggagctcagtttgttggcctggaattatataaacgacttaaggaatttttgaagaattacttgacaaatcttcttaaggatggagaagatttgatggatgagagtgtactgaaattctacactcaacaatgggaagattatcgattttcaagcaaagtgctgaatggaatttgtgcctacctcaatagacattgggttcgccgtgaatgtgacgaaggacgaaaaggaatatatgaaatctattcgcttgcattggtgacttggagagactgtctgttcaggccactgaataaacaggtaacaaatgctgttttaaagctgattgaaaaggaaaggaatggtgaaaccatcaatacaagattgattagtggagttgtacagtcttacgtggaattggggctgaatgaagatgatgcatttgcaaagggccctacgttaacagtgtataaagaatcctttgaatctcaatttttggctgacacagagagattttataccagagagagtactgaattcttgcagcagaacccagttactgaatatatgaaaaaggcagaggctcgtctgcttgaggaacaacgaagagttcaggtttaccttcatgaaagcacacaagatgaattagcaaggaaatgtgaacaagtcctcattgaaaaacacttggaaattttccacacagaatttcagaatttattggatgctgacaaaaatgaagatttgggacgcatgtataatcttgtatctagaatccaggatggcctaggagaattgaaaaaactgttggagacacacattcataatcagggtcttgcagccattgaaaagtgtggagaagctgctttaaatgaccccaaaatgtatgtacagacagtgcttgatgttcataaaaaatacaatgccctggtaatgtctgcattcaacaatgacgctggctttgtggctgctcttgataaggcttgtggtcgcttcataaacaacaacgcggttaccaagatggcccaatcatccagtaaatcccctgagttgctggctcgatactgtgactccttgttgaagaaaagttccaagaacccagaggaggcagaactagaagacacactcaatcaagtgatggttgtcttcaagtacatagaagacaaagacgtatttcagaagttctatgcgaagatgctcgccaagaggctcgtccaccagaacagtgcaagtgacgatgccgaagccagcatgatctccaagttaaagcaagcttgcgggttcgagtacacctctaa

SEQ ID NO: 347 - DNA, 1672 bp, Homo sapiens
  misc_feature (1667): n equals a,t,g, or c
cgatgtcttattgtgatgagtctcgactgtcaaatcttcttcggaggatcacccgggaaracgacmgagacygaagattggyyactgtaaagcagttgaaagaatttattcagcaaccagaaaataagctggtactagttaaacaattggatatcttggctgctgyacatgatgtgcttaatgaaagtagcaaattgcttcaggagttgagacaggagggagcttgctgtctyggccttctttgtgcttctctgagctatgaggctgagaagatcttcaagtggatttttagcaaatttagctcatctgcaaaagatgaagttaaactcctctacttatgtgccacctacaaagcactagagactgtaggagaaaagaaagccttttcatctgtaatgcagcttgtaatgaccagcctgcagtcaattcttgaaaatgtggatacaccagaattgctttgcaaatgtgttaagtgcattcttttggtggctcgatgttaccctcatattttcagcrctaattttagggatacagttgatatattagttggatggcatagagatcatactcagaaaccttcgctcacgcagcaggtatctgggtggttgcagagtttggagccattttgggtagctgatcttgcatttcctacgactcttcttggtcagtttctagaagacatggaagcatatgctgaggacctcagccatgtggcctctggggaatcagtggatgaagacgtccctcctccatcagtgtcatyaccaaagctggctgcgcttctccgggtatttagtactgtggtgaggagcaytggggaamgcytcagcccaattcgggycctccaattactgaggcatacgtaacagatgttctgtacagagtaatgagatgtgtgacggctgcaaaccaggtgtttttttctgaggctgtgttgacagctgctaatgagygtgttggtgttttgctcggcagcttggatcctagcatgactatacattgtgacatggtcattacatatggattagaccaactggagaattgccagacttgtggtaccgattatatcatctcagtcttgaatttactcacgctgattgttgaacagataaatacgaaactgccatcatcatttgtagaaaaactgtttataccatcatctaaactactattcttgcgttatcataaagaaaaagaggttgttgctgtagcccatgctgtttatcaagcaatgctcagcttgaagaatattcctgttttggagactgcctataagttaatattgggagaaatgacttgtgccctaaacaacctcctgcacagtctgcaacttcctgaggcctgttctgaaataaaacatgaggcttttaagaatcatgtgttcaatgtagacaatgcaaaatttgtagttaaatttgacctcagtgccctgactacaaytggaaatgccaaaaactcgagtctttaattgtaatgactttgttttatccacagttaagccttttctcattacatatttatgtatttcactgtcatgtcaacatgtctgcagaatcactgtatgtaacaaacagccatatttaagacatgcctggataaataaaattggtaggaatgttttcttgccattataaaaaaaaaaaaaaaaaaaaaaaaaaggggggccnccctt

SEQ ID NO: 348 - DNA, 1483 bp, Homo sapiens
  misc_feature (19): n equals a,t,g, or c
ccgcgggcgcggcgcgggnaggcgaccatgcgcggcgcgggggcgatcctgcggccggcggcgcgtggtgcccgggacctgaacccgcggcgggacatctcctcctggctggcccagtggttccctagaaccccagccaggtccgtggtggccctgaagacccccatcaaggtggagctggtggcagggaaaacctacaggtggtgtgtgtgtggccgcagcaagaagcagcccttctgtgacggctcccacttcttccaacgcactggcctatctccactcaagttcaaggcccaagagacccgcatggtggcactctgtacctgcaaggccactcagaggcccccgtactgcgatggcacccacaggagtgagcgcgtgcagaaggcagaagtgggctccccactctgagggggctgctgctgtccagccacaggtggccttggctccaggcctctgacaggcacccccttctgtgggaaaggaaacaggtgctgagcccaagagactctggtacccactgctggctcatgaaggaagaattattccttataacctaaaagtctccagtctggggcaggcgggagtgggccctggttcaatgtttgctgatggggaagatggcaaaaacaagcctgcccaaccagactggtagtcctgcagtcactgctatgaggcccatgtgctgcctcctgctccagattttaacctctctgtgggctgggggcacctgaccagccacaggagagggcagttcagattcattctgtatggggtccccaagccaggctaaacccagagatgagaggcacccttcccttcttccctccaccccaaagaactacaggctccagaaagtatgcagcatttattacaaagccaagagatacagatgtcccagggcaaaggagggtacagtcacaggacctcagacacaggacaaggtgcaaacacagacaagcccatcagggggctcccaaccccacacacctacgctatgatggaatctcgagtctcgactcccgactcctctcagatctatgcacacttgaggaaatctcggtgggcagcgacctgccagggtctgtccctaaggaggtggtccgctgacctctcaaggggtgggggtggggtcagagcttacaggtttctgtcttcttgtgcttttagatgcagttgctctgtcctgaccaggtgaccgggcctcagctgggggtggaggggcaattggaaggctgtttgcctctggcaaagtctgggatctgtgcttgtgtgaggttaacccacccccacttccactctaggccccaggtgagactccaccaccagtcctgctagtgagggttccccggtgagggtaaggttggtgggggtgcagcgcttcacaatgctaaagccttagccctcctccaagagctgagacctctcagggcctgaatcttcttttccacaagataaatgatgcaaaggccacacacacagg

SEQ ID NO: 349 - DNA, 1842 bp, Homo sapiens
aatatwtgtattttttgatcctwtgaacctgaaaagggtcagaaggatgcccagacatcagcctccttctttcaccccttaccccaaagagaaagagtttgaaactcgagaccataaagatattctttagtggaggctggatgtgcattagcctggatcctcagttctcaaatgtgtgtggcagccaggatgactagatcctgggtttccatccttgagattctgaagtatgaagtctgagggaaaccagagtctgtatttttctaaactccctggctgttctgatcggccagttttcggaaacactgacttaggtttcaggaagttgccatgggaaacaaataatttgaactttggaacagggttggaattcaaccacgcaggaagcctactatttaaatccttggcttcaggttagtgacatttaatgccatctagctagcaattgcgaccttaatttaactttccagtcttagctgaggctgagaaagctaaagtttggttttgacaggttttccaaaagtaaagatgctacttcccactgtatgggggagattgaactttccccgtctcccgtcttctgcctcccactccataccccgccaaggaaaggcatgtacaaaaattatgcaattcagtgttccaagtctctgtgtaaccagctcagtgttttggtggaaaaaacattttaagttttactgataatttgaggttagatgggaggatgaattgtcacatctatccacactgtcaaacaggttggtgtgggttcattggcattctttgcaatactgcttaattgctgataccatatgaatgaaacatgggctgtgattactgcaatcactgtgctatcggcagatgatgctttggaagatgcagaagcaataataaagtacttgactacctactggtgtaatctcaatgcaagccccaactttcttatccaactttttcatagtaagtgcgaagactgagccagattggccaattaaaaacgaaaacctgactaggttctgtagagccaattagacttgaaatacgtttgtgtttctagaatcacagctcaagcattctgtttatcgctcactctcccttgtacagccttattttgttggtgctttgcattttgatattgctgtgagccttgcatgacatcatgaggccggatgaaacttctcagtccagcagtttccagtcctaacaaatgctcccacctgaatttgtatatgactgcatttgtgggtgtgtgtgtgttttcagcaaattccagatttgtttccttttggcctcctgcaaagtctccagaagaaaatttgccaatctttcctactttctatttttatgatgacaatcaaagccggcctgagaaacactatttgtgactttttaaacgattagtgatgtccttaaaatgtggtctgccaatctgtacaaaatggtcctatttttgtgaagagggacataagataaaatgatgttatacatcaatatgtatatatgtatttctatatagacttggagaatactgccaaaacatttatgacaagctgtatcactgccttcgtttatatttttttaactgtgataatccccacaggcacattaactgttgcacttttgaatgtccaaaatttatattttagaaataataaaaagaaagatacttacatgttcccaaaacaatggtgtggtgaatgtgtgagaaaaactaacttgatagggtctaccaatacaaaatgtattacgaatgcccctgttcatgtttttgttttaaaacgtgtaaatgaagatctttatatttcaataaatgatatataatttaaagttaaaaaaaaaaga

SEQ ID NO: 350 - DNA, 3008 bp, Homo sapiens
  misc_feature (9): n equals a,t,g, or c
  misc_feature (59): n equals a,t,g, or c
  misc_feature (65): n equals a,t,g, or c
  misc_feature (1307): n equals a,t,g, or c
acagcatcnttaggaaacctaaggtagagaatccccccagagagcctggcaagggaatntcgagncacgaagagtttctccaacccaaggaggccagacagagggacgtggtcactctctgaaaagttcaacttgagagacaaaatgcagtggacctccctcctgctgctggcagggctcttctccctctcccaggcccagtatgaagatgaccctcattggtggttccactacctccgcagccagcagtccacctactacgatccctatgacccttacccgtatgagacctacgagccttacccctatggggtggatgaagggccagcctacacctacggctctccatcccctccagatccccgcgactgcccccaggaatgcgactgcccacccaacttccccacggccatgtactgtgacaatcgcaacctcaagtacctgcccttcgttccctcccgcatgaagtatgtgtacttccagaacaaccagatcacctccatccaggaaggcgtctttgacaatgccacagggctgctctggattgctctccacggcaaccagatcaccagtgataaggtgggcaggaaggtcttctccaagctgaggcacctggagaggctgtacctggaccacaacaacctgacccggatgcccggtcccctgcctcgatccctgagagagctccatctcgaccacaaccagatctcacgggtccccaacaatgctctggaggggctggagaacctcacggccttgtacctccaacacaatgagatccaggaagtgggcagttccatgaggggcctccggtcactgatcttgctggacctgagttataaccaccttcggaaggtgcctgatgggctgccctcagctcttgagcagctgtacatggagcacaacaatgtctacaccgtccccgatagctacttccggggggcgcccaagctgctgtatgtgcggctgtcccacaacagtctaaccaacaatggcctggcctccaacaccttcaattccagcagcctccttgagctagacctctcctacaaccagctgcagaagatccccccagtcaacaccaacctggagaacctctacctccaaggcaataggatcaatgagttctccatcagcagcttctgcaccgtggtggacgtcgtgaacttctccaagctgcaggtgctgcgcctggacgggaacgagatcaagcgcagcgccatgcctgccgacgcgcccctctgcctgcgccttgccagcctcatcgagatctgagcagccctggcaccgggtactgggcggaarancccccgtggcatttggcttgatggtttggtttggcttttgctggaaggtccaggatggaccatgtgacagaagtccacgggcaccctctgtagtcttctttcctgtaggtggggttagggggggcgatcagggacaggcagccttctgctgaggacataggcagaagctcactcttttccagggacagaagtggtggtagatggaaggatccctggatgttccaaccccataaatctcacggctcttaagttcttcccaatgatctgaggtcatggaacttcaaaagtggcatgggcaatagtatataaccatacttttctaacaatccctggctgtctgtgagcagcacttgacagctctccctctgtgctgggctggtcgtgcagttactctgggctcccatttgttgcttctcaaaatatacctcttgcccagctgcctcttctgaaatccacttcacccactccactttcctccacagatgcctcttctgtgccttaagcagagtcaggagaccccaaggcatgtgagcatctgcccagcaacctgtggagacaacccacactgtgtctgagggtgaaaggacaccaggagtcacttctatacctccctaacctcacccctggaaagccaccagattggaggtcaccagcatgatgataatattcatgacctgatgtgggaggagacagccaacctcaggcttagatcaatgtatagggctatattttggcagctgggtagctctttgaaggtggataagacttcagaagaggaaaggccagactttgcttaccatcagcatctgcaatgggccaaacacacctcaaattggctgagttgagaaagcagccccagtagttccattcttgcccagcactttctgcattccaaacagcatcctacctgggtttttatccacaaaggtagcggccacatggtttttaaagtatgagaaacacagtttgtcctctccttttatccaagcaggaagattctatatcctgatggtagagacagactccaggcagccctggacttgctagcccaaagaaggaggatgtggttaatctgtttcacctggtttgtcctaaggccatagttaaaaagtaccagctctggctggggtccgtgaagcccaggccaggcagccaaatcttgcctgtgctgggcatacaaccctctgctttcacatctctgagctatatcctcattagtgaaggtggcttttgctttatagtttggctggggagcacttaattcttcccatttcaaaaggtaatgttgcctggggcttaacccacctgccctttgggcaaggttgggacaaagccatctgggcagtcaggggcaaggactgttggaggagagttagcccaagtatagctctgcccagatgccatcacatccctgatactgtgtatgctttgaagcaccttccctgagaagggaagaggggatctttggactasgttcttggctccagacctggaatccacaaaagccaaaccagctcatttcaacaaaggagctccgatgtgagggcaaggctgccccctgccccagggctcttcagaaagcatctgcatgtgaacaccatcatgcctttataaaggatccttattacaggaaaagcatgagtggtggctaacctgaccaataaagttattttatgattgcawmwaaaaaaaaaaaaaaaa

SEQ ID NO: 351 - DNA, 2756 bp, Homo sapiens
  misc_feature (1597): n equals a,t,g, or c
  misc_feature (2540): n equals a,t,g, or c
gtcggctgtgacggccttcagcgagggcagcgtcatcgcctactactggtctgagttcagcatcccgcagcacctggtggaggaggccgagcgcgtcatggccgaggagcgcgtagtcatgctgcccccgcgggcgcgctccctgaagtcctttgtggtcacctcagtggtggctttccccacggactccaaaacagtacagaggacccaggacaacagctgcagctttggcctgcacgcccgcggtgtggagctgatgcgcttcaccacgcccggcttccctgacagcccctaccccgctcatgcccgctgccagtgggccctgcggggggacgccgactcagtgctgagcctcaccttccgcagctttgaccttgcgtcctgcgacgagcgcggcagcgacctggtgacggtgtacaacaccctgagccccatggagccccacgccctggtgcagttgtgtggcacctaccctccctcctacaacctgaccttccactcctcccagaacgtcctgctcatcacactgataaccaacactgagcggcggcatcccggctttgaggccaccttcttccagctgcctaggatgagcagctgtggaggccgcttacgtaaagcccaggggacattcaacagcccctactacccaggccactacccacccaacattgaytgcacatggaacattgaggtgcccaacaaccagcatgtgaaggtgcgcttcaaattcttctacctgctggagcccggcgtgcctgcgggcacctgccccaaggactacgtggagatcaayggggagaaatactgcggagagaggtcccagttcgtcgtcaccagcaacagcaacaagatcacagttcgcttccactcagatcagtcctacaccgacaccggcttcttagctgaatacctctcctacgactccagtgacccatgcccggggcagttcacgtgccgcacggggcggtgtatccggaaggagctgcgctgtgatggctgggccgactgcaccgaccacagcgatgagctcaactgcagttgcgacgccggccaccagttcacgtgcaagaacaagttctgcaagcccctcttctgggtctgcgacagtgtgaacgactgcrgagacaacagcgacgagcaggggtgcagttgtccggcccagaccttcaggtgttccaatgggaagtgcctctcgaaaagccagcagtgcaatgggaaggacgactgtggggacgggtccgacgaggcctcctgccccaaggtgaacgtcgtcacttgtaccaaacacacctaccgctgcctcaatgggctctgcttgagcaagggcaaccctgagtgtgacgggaaggaggactgtagcgacggctcagatgagaaggactgcgactgtgggctgcggtcattcacgagacaggctcgtgttgttgggggcacggatgcggatgagggcgagtggccctggcaggtaagcctgcatgctctgggccagggcacatctkgcggtgcttccctcatctctcccaactggctggtctctgccgcacactgctacatcgatgacagaggattcaggtactcagaccccacgcagtgnacggccttcctgggcttgcacgaccagagccagcgcagccycctggggtgcaggagcgcaggctcaagcgcatcatctcccaccccttcttcaatgacttcaccttcgactatgacatcgcgctgctggagctggagaaaccggcagagtacagctccatggtgcggcccatctgcctgccggacgcctcccatgtcttccctgccggcaaggccatctgggtcacgggctggggacacacccagtatggaggcactggcgcgctgatcctgcaaaagggtgagatccgcgtcatcaaccagaccacctgcgagaacctcctgccgcagcagatcacgccgcgcatgatgtgcgtgggcttcctcagcggcggcgtggactcctgccagggtgattccgggggacccctgtccagcgtggaggcggatgggcggatcttccaggccggtgtggtgagctggggagacggctgcgctcagaggaacaagccaggcgtgtacacaaggctccctctgtttcgggactggatcaaagagaacactggggtataggggccggggccacccaaatgtgtacacctgcggggccacccatcgtccaccccagtgtgcacgcctgcaggctggagactggaccgctgactgcaccagcgcccccagaacatacactgtgaactcaatctccagggctccaaatctgcctagaaaacctctcgcttcctcagcctccaaagtggagctgggaggtagaaggggaggacactggtggttctactgacccaactgggggcaaaggtttgaagacacagcctcccccgccagccccaagctgggccgaggcgcgtttgtgyatatctgcctcccctgtctstaaggagcagcgggaacggagcttcggrgcctcctcagtgaaggtggtggggctgccggatctgggctgtggngcccttgggccacgctcttgaggaagcccaggctcggaggaccctggaaaacagacgggtctgagactgaaattgttttaccagctcccagggtggacttcagtgtgtgtatttgtgtaaatgagtaaaacattttatttctttttaaaaaaaaaaaaaaaaaaaaaaaaaaaaaaaaaaaaaaaaaaaaaaaaaaaaaaaaaaaaaaaaaaaaaa

SEQ ID NO: 352 - DNA, 1645 bp, Homo sapiens
  misc_feature (97): n equals a,t,g, or c
  misc_feature (1574): n equals a,t,g, or c
  misc_feature (1596): n equals a,t,g, or c
cgcgtccgcccacgcgtccgcccacgcgtccggaaaaatattctttgaataaccttgcagtactatatttcaatttctttataaatttaagtgcatnttaactcataattgtacactataatataagcctaagtttttattcataagttttattgaagttctgatcggtccccttcagaaatttttttatattattcttcaagttactttcttatttatattgtatgtgcattttatccattaatgtttcatactttctgagagtataatacccttttaaaagatatttggtataccaatacttttcctggattgaaaactttttttaaactttttaaaatttgggccactctgtatgcatatgtttggtcttgttaaagaggaagaaaggatgtgtgttatactgtacctgtgaatgttgatacagttacaatttatttgacaaggttgtaattctagaatatgcttaataaaatgaaaactggccatgactacagccagaactgttatgagattaacatttctattgagaagcttttgagtaaagtactgtatttgttcatgaagatgactgagatggtaacacttcgtgtagcttaaggaaatgggcagaatttcgtaaatgctgttgtgcagatgtgttttccctgaatgctttcgtattagtggcgaccagtttctcacagaattgtgaagcctgaaggccaagaggaagtcactgttaaaggactctgtgccatcttacaaccttggatgaattatcctgccaacgtgaaaacctcatgttcaaagaacacttccctttagccgatgtaactgctggttttgtttttcatatgtgtttttcttacactcatttgaatgctttcaagcatttgtaaacttaaaaaatgtataaagggcaaaaagtctgaacccttgttttctgaaatctaatcagttatgtatggtttctgaagggtaattttattttggaataggtaaaggaaacctgttttgtttgtttttcctgagggctagatgcattttttttctcacactcttaatgacttttaacatttatactgagcatccatagatatattcctagaagtatgagaagaattattcttattgaccattaatgtcatgttcattttaatgtaatataattgagatgaaatgttctctggttggaacagatactctcttttttttcttgcaatctttaagaatacatagatctaaaattcattagcttgacccctcaaagtaacttttaagtaaagattaaagcttttcttctcagtgaatatatctgctagaaggaaatagctgggaagaatttaatgatcagggaaattcattatttctatatgtggaaactttttgcttcgaatattgtatctttttaaatctaaatgttcatatttttcctgaagaaaccactgtgtaaaaatcaaattttaattttgaatggaataatttcaaagaactatgaagatgatttgaagctctaatttatatagtcacctataaaatgttctttatatgtgttcataagtaaattttatattgattaagttaaacttttngaattggatttgaggagcagtnaaaatgaaagctatatctattctraaaccttrtttaagaccatttgggg

SEQ ID NO: 353 - DNA, 1637 bp, Homo sapiens
  misc_feature (738): n equals a,t,g, or c
  misc_feature (771): n equals a,t,g, or c
gcccgctgaggacgcagcgtcactgacctggggagtcgcgattcgtgccggccggtcctggttctccggtcccgccgctcccgcagcagccatgtcgttcttcccggagctttactttaacgtggacaatggctacttggagggactggtgcgcggcctgaaggccggggtgctcagccaggccgactacctcaacctggtgcagtgcgagacgctagaggacttgaaactgcatctgcagagcactgattatggtaacttcctggccaacgaggcatcacctctgacggtgtcagtcatcgatgaccggctcaaggagaagatggtggtggagttccgccacatgaggaaccatgcctatgagccactcgccagcttcctagacttcattacttacagttacatgatcgacaacgtgatcctgctcatcacaggcacgctgcaccagcgctccatcgctgagctcgtgcccaagtgccacccactaggcagcttcgagcagatggaggccgtgaacattgctcagacacctgctgagctctacaatgccattctggtggacacgcctcttgcggcttttttccaggactgcatttcagagcaggaccttgacgagatgaacatcgagatcatccgcaacaccctctacaaggcctacctggagtccttctacaagttctgcaccctactgggcgggactacggctgatgccatgtgccccatcctggagtttscaangcagaccgtgccaagctctttccacactgtggncggctctaccctgagggcctggcgcastggctcgggctgacgactatgaacaggtcaagaacgtggccgattactacccggagtacaagctgctcttcgagggtgcaggtagcaaccctggagacaagacgctggaggaccgattctttgagcacgaggtaaagctgaacaagttggccttcctgaaccagttccactttggtgtcttctatgccttcgtgaagctcaaggagcaggagtgtcgcaacatcgtgtggatcgctgaatgtatcgcccagcgccaccgcgccaaaatcgacaactacatccctatcttctagcgtcctggcccaaggctctcaattgcactctttgtgtgtgtgtgtgtgtgtgtgcgcgtgtgtgtgcgtgtgtgtgtatgtggtctgtgacaagcctgtggctcacctgcctgtccggggtgtagtacgctgtcctagcggctgcccagttctcctgaccctcttagagactgttcttaggcctgaaaaggggctgggcacccccccccaccaaggatggacgaagaccccctccagagcaaggaggccccctcagccctgtggttacagccgctgatgtatctaagaagcatgtcactttcatgttcctccctaactccctgacctgagaaccctggggcctgggggcagtttgagcctcctctcccttctgtgggtcgctcccagagccatggcccatgggaaggacagagtgtgtgtgtccttggggcctggggggatgttgctcctcagctccctccctcagccctgcccctctgagacaataaaactgccctctctaaggccaaaaaaaaaaaaaaaaaaaaaaaaaaaaaaaaaaaaaaa

SEQ ID NO: 354 - DNA, 1119 bp, Homo sapiens
cggcacgagcccgcgccccgcgaggctccggggtctcgggcttccgccttcttgctgccctcgttcttgccrgggccgcggttagtccctgctggccaccccactgcgaccatgttcgttccctgcggggagtcggcccccgaccttgccggcttcaccctcctaatgccagcagtatctgttggaaatgttggccagcttgcaatggatctgattatttctacactgaatatgtctaagattggttacttctataccgattgtcttgtgccaatggttggaaacaatccatatgcgaccacagaaggaaattcaacagaacttagcataaatgctgaagtgtattcattgccttcaagaaagctggtggctctacagttaagatccatttttattaagtataaatcaaagccattctgtgaaaaactgctttcctgggtgaaaagcagtggctgtgccagagtcattgttctttcragcagtcattcatatcagcgtaatgatctgcagcttcgtagtactcccttccggtacctacttacaccttccatgcaaaaaagtgttcaaaataaaataaagagccttaactgggaagaaatggaaaaaagccggtgcattcctgaaatagatgattccgagttttgtatccgcattccgggaggaggtatcacaaaaacactctatgatgaaagctgttctaaagaaatccaaatggcagttctgctgaaatttgtttcagaaggggacaacatcccagatgcattaggtcttgttgagtatcttaatgagtggcttcagatactcaaaccacttagcgatgaccccacagtatctgcctcacggtggaaaataccaagttcttggagattactctttggcagtggtcttccccctgcacttttctgatctaatttctgttttataccttatacccaaaacacttactaccaacacagctgttaaacattctatacaaaaaaattgtatgatctggtattaggaaattactttcacagtaaatatcaaagaaaaaagattaarggtctctttgccatgcttttcatcatatgcaccaaatgtaaattttgtacctcggccgcgaccacgctaagccgaatt

SEQ ID NO: 355 - DNA, 738 bp, Homo sapiens
  misc_feature (654): n equals a,t,g, or c
  misc_feature (689): n equals a,t,g, or c
ggcacgagggacttgctgctggctgccgccgccgccactggaaagctgaaatccttcgcccggaaattcatcaatttgaatgaattcacaacctatggcagcgargaaagcaccaaaccggcctccgtccgggccctgctgtttgamatctccttcctcatgctgtgccatgtggcccagacctatggttcaraggtgattctgtccgagtcgcgcacaggagctgaggtgcccttcttcgagacctggatgcagacctgcatgcctgaggagggcaagatcctgaaccctgaccacccctgcttccgccccgactccaccaaagtggagtccctggtggccctgctcaacaactcctcggagatgaagctagtgcagatgaagtggcatgaggcctgtctcagcatctcagccgccatcttggaaatcctcaatgcctgggagaatggggtcctggccttcgagtccatccagaaaatcactgataacatcaaagggaaggtatgcagtctggcggtgtgtgctgtggcttggcttgtggcccacgtccggatgctggggctggatgagcgtgagaagtcgctgcagatgatccgccagctggcagggccactgtttagygagaacaccctgcagttctacaatgagagggtngtgatcatgaactcgatcctgggagcgcatgtgtnccgacgtgctgcagcagacagccacgcaggattcaagtttccctccaac

SEQ ID NO: 356 - DNA, 1966 bp, Homo sapiens
  misc_feature (56): n equals a,t,g, or c
  misc_feature (788): n equals a,t,g, or c
  misc_feature (1753): n equals a,t,g, or c
gaactagtctcgagttttttctgtctagctccgaccggctgaggcggcgcggcagnggagggacggcagtctcgcrcggctactgcagcactggggtgtcagttgttggtccgacccagaacgcttcagttctgctctgcaaggatatataataactgattggtgtgcccgtttaataaaagaatatggaaactgaacagccagaagaaaccttccctaacactgaaaccaatggtgaatttggtaaacgccctgcagaagatatggaagaggaacaagcatttaaaagatctagaaacactgatgagatggttgaattacgcattctgcttcagagcaagaatgctggggcagtgattggaaaaggaggcaagaatattaaggctctccgtacagactacaatgccagtgtttcagtcccagacagcagtggccccgagcgcatattgagtatcagtgctgatattgaaacaattggagaaattctgaagaaaatcatccctaccttggaagagggcctgcagttgccatcacccactgcaaccagccagctcccgctcgaatctgatgctgtggaatgcttaaattaccaacactataaaggaagtgactttgactgcgagttgaggctgttgattcatcagagtctagcaggaggaattattggggtcaaaggtgctaaaatcaaagaacttcgagagaacactcaaaccaccatcaagcttttccaggaatgctgtcctcattccactgacagagttgttcttattggaggaaaacccgatagngttgtagagtgcataaagatcatccttgatcttatatctgagtctcccatcaaaggacgtgcacagccttatgatcccaatttttacgatgaaacctatgattatggtggttttacaatgatgtttgatgaccgtcgcggacgcccagtgggatttcccatgcggggaagaggtggttttgacagaatgcctcctggtcggggtgggcgtcccatgcctccatctagaagagattatgatgatatgagccctcgtcgaggaccacctccccctcctcccggacgaggcggccggggtggtagcagagctcggaatcttcctcttcctccaccaccaccacctagagggggagacctcatggcctatgacagaagagggagacctggagaccgttacgacggcatggttggtttcagtgctgatgaaacttgggactctgcaatagatacatggagcccatcagaatggcagatggcttatgaaccacagggtggctccggatatgattattcctatgcagggggtcgtggctcatatggtgatcttggtggacctattattactacacaagtaactattcccaaagatttggctggatctattattggcaaaggtggtcagcggattaaacaaatccgtcatgagtcgggagcttcgatcaaaattgatgagcctttagaaggatccgaagatcggatcattaccattacaggaacacaggaccagatacagaatgcacagtatttgctgcagaacagtgtaagcagtwtmagwttagctttgtgttagcttatacatactaaaacctttaaaaagcttttcttctcaattgatttttttcttttagaagccatggtgtctcaaccttttggggacctaacttctaaacattctaatagtttgccttaatttttcttctgctttcttactaaaaacgargacattcaatactaatcttgcctggnaggaagccttgaaccaagcaaacttctgcatttctctggtgaaaactgctgccaaaaccacttgttaaaaattgtacagagcctgtaggaaaatatagaaggttccattgggatgttggcctagttctgtgtgggaagacttagtggattttgtttgtttttagataactaaatcggccaacaaatcaccgttctggcctatgggaccgggcc

SEQ ID NO: 357 - DNA, 1562 bp, Homo sapiens
  misc_feature (16): n equals a,t,g, or c
  misc_feature (18): n equals a,t,g, or c
  misc_feature (260): n equals a,t,g, or c
  misc_feature (262): n equals a,t,g, or c
taccccgccgcctgcngnaccggtccggaattcccgggtcgacccacgcgtccgcatgaaatggaccaatactggggaattggcagtctggccagtgggataaatttgttcacaaacagttttgagggcccagttcttgatcacaggtattatgcaggtggatgctccccgcattacatcctgaacacgaggtttaggaagccctacaatgtggaaagctacacgccacagacccaaggcaaatacgaattcatattaananagtatgaatcatactcagattttgaacgcaatgtcacagagaaaatggcaagcaagtctggtttcagttttggttttaaaatacctggaatatttgaacttggcatcagtagtcaaagtgatcgaggcaaacactatattaggagaaccaaacgattctctcatactaaaagcgtatttctgcatgcacgctctgaccttgaagtagcacattacaagctgaaacccagaagcctcatgctccattacgagttccttcagagagttaagcggctgcccctggagtacagctacggggaatacagagatctcttccgtgattttgggacccactacatcacagaggctgtgcttgggggcatttatgaatacaccctcgttatgaacaaagaggccatggagagaggagattatactcttaacaacgtccatgcctgtgccaaaaatgattttaaaattggtggtgccattgaagaggtctacgtcagtctgggtgtgtctgtaggcaaatgcagaggtattctgaatgaaataaaagacagaaacaagagggacaccatggtggaggacttggtggtcctggtacgaggaggggcaagtgagcacatcaccaccctggcataccaggagctgccgacggcggacctgatgcaggagtggggagacgctgtgcagtacaacccagccatcatcaaagttaaggtggagcctctgtatgaactagtgacagccacagattttgcctattccagcacagtgaggcagaacatgaagcaggcactggaggagttccagaaggaagttagttcctgccactgtgctccctgccaaggaaatggagtccctgtcctgaaaggatcacgctgtgactgcatctgtcctgttggatcccaaggcctagcctgtgaggtctcctatcggaagaatacccccattgatgggaagtggaattgctggtcaaattggtcttcatgctctggaagacgtaagacaagacaaaggcagtgtaacaatccacctcctcaaaatgggggtagcccctgttcaggccctgcttcagaaacacttgactgctcctagcagatgatacagcagtgggctacatacaatgagagccctgagccctcaagaactcaygccagctcagccctacaccagtttccacctggagttcatgcaagggcaaaaggcagtgccatgcaagctgtttaaaataaagatgttaccttgtaaaatgcaagttgatttaaataaatactgagttaaaggctttaaaaaaaaaaaaaaaaaaagggggggcg

SEQ ID NO: 358 - DNA, 1931 bp, Homo sapiens
ctcgggagctcggactcctacgcatcaccgggaagggccgccgccccgcccgcggctgctggcccgggtgacacttccgcctgctataagagcagcggccctcggtgcctccttcctgacctcgcacccagctcggagcccggagcgtgcctcggcggcctgtcggttttcaccatggagcagctgagctcagcaaacacccgcttcgccttggacctgttcctggcgttgagtgagaacaatccggctggaaacatcttcatctctcccttcagcatttcatctgctatggccatggtttttctggggaccagaggtaacacggcagcacagctgtccaagactttccatttcaacacggttgaagaggttcattcaagattccagagtctgaatgctgatatcaacaaacgtggagcgtcttatattctgaaacttgctaatagattatatggagagaaaacttacaatttccttcctgagttcttggtttcgactcagaaaacatatggtgctgacctggccagtgtggattttcagcatgcctctgaagatgcaaggaagaccataaaccagtgggtcaaaggacagacagaaggaaaaattccggaactgttggcttcgggcatggttgataacatgaccaaacttgtgctagtaaatgccatctatttcaagggaaactggaaggataaattcatgaaagaagccacgacgaatgcaccattcagattgaataagaaagacagaaaaactgtgaaaatgatgtatcagaagaaaaaatttgcatatggctacatcgaggaccttaagtgccgtgtgctggaactgccttaccaaggcgaggagctcagcatggtcatcctgctgccggatgacattgaggacgagtccacgggcctgaagaagattgaggaacagttgactttggaaaagttgcatgagtggactaaacctgagaatctcgatttcattgaagttaatgtcagcttgcccaggttcaaactggaagagagttacactctcaactccgacctcgcccgcctaggtgtgcaggatctctttaacagtagcaaggctgatctgtctggcatgtcaggagccagagatatttttatatcaaaaattgtccacaagtcatttgtggaagtgaatgaagagggaacagaggcggcagctgccacagcaggcatcgcaactttctgcatgttgatgcccgaagaaaatttcactgccgaccatccattccttttctttattcggcataattcctcaggtagcatcctattcttggggagattttcttccccttagaagaaagagactgtagcaatacaaaaatcaagcttagtgctttattacctgagtttttaatagagccaatatgtcttatatctttaccaataaaaccactgtccagaaacaagtctttcattttctttgtaagtttggctctgttggctgtttacacccatgaattttggcatgggtatctattttycttttttacattgaaaaaaatccagtggttgcttttgaatgcatcaagtaaagaagaagaaaagaatacatccgatgcgtagattcttgaccatgtagtaatctataaaattgctatatcctcctgatagccatgggaaaacatgataagatggtcatttattttgcagttagaattttggaagccacaaaatagacagacaccctgactgttgaagggaggtttaaaaacagatattcaattgaaatgtaagagagcaccccaattgagagcccaggttacgaagacaagcttgcctcgcctgacttttctgtcccttgttctgcaggattagtattctgttacagacctctagtttttagactcttcaattaaagggccaatggttataacctgcaaaaaaaaaaaaaaaaaaaaaaaaaaaaaaaaa

SEQ ID NO: 359 - DNA, 869 bp, Homo sapiens
  misc_feature (869): n equals a,t,g, or c
gctctggcgggcataccagcgggccctggccgctcacccgtggaaagtacaggtyctgacagctgggccctgtggtaggaggctggtacaaggttttggatcggttcatccctggcaccaccaaagtggatgcactgaagaagatgttgttggatcaggggggctttgccccgtgttttctaggctgctttctcccactggtaggggcacttaatggactgtcagcccaggacaactggccaaactacagcgggattatcctgatgcccttatcaccaactactatctatggcctgctgtgcakttagccaacttctacctggtcccccttcattacaggttggccgttgtccaatgtgttgctgttatctggaactcctacctgtcctggaaggcacatcggctctaagcctgcctcactccatcgtttccaccttgcagtgatgcagcttgaccctggaacggtcagacaacctcctcaaagtgggcataccagtttccacggggttgggttgccggtcagagcttaagaggactagcaccctgcaatgcccctcttcactctaaaatgtacactgactgctttagagcccttgataatagtcttattcccaccacatactaggcactccataaatatctgttgaaccttcatgaccttatcaactttacacccatatcccagcaaatgccactcatccccactcttcatagacacatttgttactctaaccctgcctaggcttcttgtagctccagctctttagagactcccggaaccctttatatggtgcctcagtaaatatgttattaaatatgtaatccggaaaaaaaaaaaaaaaaaaaaaaaaaaaaaaaaaaaaaaaaan

SEQ ID NO: 360 - DNA, 561 bp, Homo sapiens
  misc_feature (521): n equals a,t,g, or c
  misc_feature (525): n equals a,t,g, or c
  misc_feature (560): n equals a,t,g, or c
ggcacgagagactccagccgccaggggagcgcgtgccgttcttgcctctctggcctgcgcctcctgagccgagtagatatcccggagttccgcgcggcgccagcccttccgccacggccgtctctggagagcagcagccatggccctacgctaccctatggccgtgggcctcaacaagggccacaaagtgaccaagaacgtgagcaagcccaggcacagccgacgccgcgggcgtctgaccaaacacaccaagttcgtgcgggacatgattcgggaggtgtgtggctttgccccgtacgagcggcgcgccatggagttactgaaggtctccaaggacaaacgggccctcaaatttatcaagaaaagggtggggacgcacatccgcgccaagaggaagcgggaggagctgagcaacgtactggccgccatgaggaaagctgctgccaagaaagactgagcccctcccctgccctctccctgaaataaagaacagcttgacagaaaaaaaaaaaaaaaaaaantcgngggggggcccggtacccattcgccctawagggggng

SEQ ID NO: 361 - DNA, 1680 bp, Homo sapiens
  misc_feature (33): n equals a,t,g, or c
gagtttacactgaccatggtggaatgttaaggngaaccccaccccttcttacagatggtgacccagagcctgctcttgggaacagccagagtaagattggaacccagacttgcaagccagcgctgtttgcattaaaagggtgggtgagtcaggacccctggctcargagccgyctctcctaaaagagggtttcaaggccaaatgggtttgtcaacggtgctgtctccctttcttggagatgctcattagcttatcaaagactgagaagtcccgctgttacagaaataatttagtttgctgtattaactgctcctgggcctggagcagtattcccaccttaagattcccagcatccctgtgctgtcccggctctcattcatgccgaaggcccaacccattggctgtgttctgtttgaagatttggggggcgccttctctttcttccccagggaattctctagcagagggaggggacccaccccagtgaggaagtagattgctgcctctagccagagacctgaactggggaatttgaacattcctttacattgttggagaaatgaagccaaagttattcagatggttttcccaggctaaaggaaagtcacctgcaagagatcccggcactgatctggagcagctgacagggtgggtctcccttaccaaagagaagaaccactctctggcgctggggtgacctgctggctgggcctgtaaggtttccatgttgctgaggccatggagattcccagagctggtcacaccgaccgctctcagggcccgctgccctgggctggcaacaccattctggccttggcctgcagaagctttcagagtcttcactggcagtagggggagatggggagaggaatgatctctgcccagccccttcctttccaaaccatgcaatggaagagcccagatgggtgaagattgattttgccttaactcaagagaattcctgttctccttgtgctatgatttggacacaagattctggatacctggaacttagctgtgtactcctgtaccctaaacagtggatttgagttccagcgtttattcttttttccttttttcagatcaccatctaagttacatctttagctcaggtccatccttctcaagatctccttcttagccccccagcccctggtgctgtctgtggtcaggtgaccttactcaggagcagatatctccttggccgccatggagcctcatccatccacacgtgcctgtagcattccagagctcactgcccttctagatgtgccttcccgcttggcttccagcggcttgtgctcactctgtctgccaggtatgagaagaacacgtaagaccgccaccacactcaccctccctcaaggccctgtgccataggggtggccacccgacctgcccccagaacttttggatactggaggcagttgcataggtctccctctctgggcaccaggactcagtccagcccaagactactctgggcagctcccatcccagtctggggccatttgcagactcaggaaaggatttctacagtgttctataaaagccaaaagagagagtgggtttgggaagagtgagggtggttggggagaggggaccgatgtgcctcattgtttagtggtgattacaaatatgcttttctggataaagtttggttgtttgctcttggaaaaa

SEQ ID NO: 362 - DNA, 740 bp, Homo sapiens
  misc_feature (591): n equals a,t,g, or c
  misc_feature (709): n equals a,t,g, or c
  misc_feature (718): n equals a,t,g, or c
cagaaacaaacaaaaaggcagctgggttgtcactgatgggcagcatttgagcctgccacactggcctggaagtttcccttccagtctggattttgtctgctccttccttccccctcaccccgttacctcttcacctcccatctcatttcactgtgtagctcagtctctcccacgcacataattggggacagtgggggctctcttaccagcctcctcagcaacgcacgtccatcaggcctggcctcagtggccagccacattgatgtcacactggaattgttaccccagagagggcgaagagataggctatctccccacctcccaccctactccccactatattcccgttttgaccacctcagcccctcagctgccccctctcactttggccaatcccaggcaccaatcagacttcctcctccacctggagcccctagcatttccttgtcccctcttccccaaaacctctgtaaagggtacgagagggaccccctgccgagccgcccgccactcagggcagtccgatctaagaagcagaagctggttggaggctggctgggcctctgtccagtccccagatgggataaactngccttttctcamatcccctcttgggtgcctkgatctttctytgcccccggggccaggacccactgtgctgttttcttgttcagttttgtggggaaaggaaccaaggtttttgccaagnaaccagttncttgaaaggggttagggaaggg

SEQ ID NO: 363 - DNA, 1324 bp, Homo sapiens
  misc_feature (385): n equals a,t,g, or c
cgctgcctggtgccgtggccgcctcctcgggcagccccccgggctcggcgctggcggcagtggcgagcggcggagacctcttcccggggcagccggtgtccgaactgatcgcgcagctgctgcgcgctgagccctaccctgcggcggccggacgcttcggcgcagggggcggcgcggcgggcgcggtgctgggcatcgacaacgtgtgcgagctggcggcgcggctgctcttcagcaccgtggagtgggcgcgccacgcgcccttcttccccgagctgccggtggccgaccaggtggcgctgctgcgcctgagctggagcgagctcttcgtgctgaacgcggcgcaggcggcgctgcccctgcacacggcgccgctactggccgncgccggcctccacgccgcgcctatggccgccgagcgcgccgtggctttcatggaccaggtgcgcgccttccaggagcaggtggacaagctgggccgcctgcaggtcgactcggccgagtatggctgcctcaaggccatcgcgctcttcacgcccgacgcctgtggcctctcagacccggcccacgttgagagcctgcaggagaaggcgcaggtggccctcaccgagtatgtgcgggcgcagtacccgtcccagccccagcgcttcgggcgcctgctgctgcggctccccgccctgcgcgcggtccctgcctccctcatctcccagctgttcttcatgcgcctggtggggaagacgcccattgagacactgatcagagacatgctgctgtcggggagtaccttcaactggccctacggctcgggccagtgaccatgacggggccacgtgtgctgtggccaggcctgcagacagacctcaagggacagggaatgctgaggcctcgaggggcctcccggggcccaggactctggcttctctcctcagacttctattttttaaagactgtgaaatgtttgtcttttctgttttttaaatgatcatgaaaccaaaaagagactgatcatccaggcctcagcctcatcctccccaggacccctgtccaggatggagggtccaatcctaggacagccttgttcctcagcacccctagcatgaacttgtgggatggtggggttggcttccctggcatgatggacaaaggcctggcgtcggccagaggggctgctccagtgggcaggggtagctagcgtgtgccaggcagatcctctggacacgtaacctatgtcagacactacatgatgactcaaggccaataataaagacatttcctacctgcaaaaaaaaaaaaaaagggtggccgctcgcgatctagaactagt

SEQ ID NO: 364 - DNA, 2853 bp, Homo sapiens
cacctcgtctatggtgtatttttgaaagacaattttttaaaggtagatttgggaaaaaaatagaattgaagatgggaaattttgttttattaaaaaggtgctagaagatgtttcaaagacaatattcttattttaatacgctgtagaaggtaggtgtggaacctccatgctaccatgtgcacaaacctaattatgctttgggtcacttgtcagttcagtaaatctgccttcctcttctcccaaatcatgtcatctttaggttgttcacctgcagctgctttaaatgaattagtatctttcagatagataaccttacaaggagaatgtttgttttgagcagctgaccaaaaatatatcaaacaggattatggccaaaaagtcactcaaatttctagagattcctttaaaagatgtatgttgatgaaattgcccctttataagaaaaacaacagcaagtcttttagtagaaatttgaaagaagtgtttgctaccattttgacccattattcccttacctatcagatgaatttgccattcactggatagaaaccattcttggatttggtaagaggtgagcaagacaaatcttgtaccatactcttatgtaccagcacttctgatggagaagcagtgaagttcagaacgktcttcacatagtccagatactgkttagagtcaggcaaatcagcaaagcctttggtatggagatgmcccatgatggctgcagttgtaagtgggcatacatgttctatcattttgaaggagaaagaaaaccgttctcacatgtcgcaaatatgtgaatcatactatattcccctaaagtaaaaccagtgacttagtggtttttgrtttatttagaagttggtttagacccttatgaaacattatttacgagttggccttatccttaagggaaaagttctaaatttttaaatttatttttaattccctagtctgagggaaatgtctttattgtccattacataaaaatgttgactccagtaatttatttttctctattttttcctccatgtatttactccatttttctctattttttccttccctgatggatttgcagaaatgttaaccaattagctcaacttttctctacctttgttgagtcttaatcttttagaagataggcttaccgtatatttatgaagcataatatattaaaagaaaacaaatctaggatgcttgcatgacataaagtatttgcctgcagttttcattaaaaactgcaagaatatcatgcttgtctgcttcttagtaaatgttaagtctgraatggaagtgaggatgtaactctactgaataatcaaagatcatcttagatttggcttgatctgtgtttattgcttctattaatgtaaatcaactctgtgccaaatcctcctccacaaaccatttattgtcttagttctagtggtatcaatgaagatagttacagtatatgaattctaagtcctgaggaagaaattttatggggtttgttaagtttcacattcgtgaaagaggaaattagtagagtattcagactttgatatttggctgttaatgggatgcatatcaaatttttaaaagaaggcttggcctaaggagtttattggtacaggtgcagatgattttaaggcattaaaggattatagagttatgtcatttagactgtttctaataactgagaccatctaacatttttcttttggagtctcatttttatttgtgcaatattttcaggcatataggctactgttcattgtatttatatatatattagaatttactaagtactttaacaagtaaaaatctgaatatgaaagaaaatatcagatttgcactttaaatgagcttaattgcttgaagttgtgcctgaaatatcgaattgcctcctattgggtgtggctttgttgaaataaatttgtaattgttgctgtttgaagatatcagtacagctgttcacagaaatatattcccagcatgtcacttttccattaaagcactaagttttctttgaatgttccattgttccgataagtattttacttttttctcagtacatcagagagagcgtgatccccctacagctgtcacttccaaatgttcctgtagcataaatggtgttacagacactgaggtgcactcttggtttctgagcagagttgtcatactggtttcctggtctctagggcactggggatgtactttgaaatcaccgaacaggcttgcaattaagatcaataaggctgcagcaccatttcaatttactttccatcttacccagtagtttttgtgtttttaaattcgtttgggtggttatgtttgcatgcttaagcacacatttgaaaattaattatagctgtactacccgatgtttttccttggggatgatggccttgttcctttttaaattctgatgcttgaattctattttctagtgatttttcacatctccctttaagtttttgctgcagcaatttgagagagtacttttgattaaatgattctgatggtgggcaccaatctacaactatgtcattaactgaagatacatgttttaatcttgttgggaataagcttacccactttctccttggtaaagcgtttacttaacaaaataatacccgagaatgtaaggtctctaagtcattactaacaaagagcaaaaataatatctgcagtattgtttttcccattgattttaagtcagtttagagtacaaactgtatattagaatttgcctgtaaaatgaattctaaaaagcagatgtaaagtctctcctgaaaatgttggcatagtaaataaaaataaagttcataattataaaaaaaaaaaaaaaaaaaaaaattactg

SEQ ID NO: 365 - DNA, 1837 bp, Homo sapiens
  misc_feature (1): n equals a,t,g, or c
  misc_feature (2): n equals a,t,g, or c
  misc_feature (3): n equals a,t,g, or c
  misc_feature (136): n equals a,t,g, or c
  misc_feature (749): n equals a,t,g, or c
  misc_feature (1816): n equals a,t,g, or c
  misc_feature (1829): n equals a,t,g, or c
  misc_feature (1832): n equals a,t,g, or c
nnnttttttttttttcacgtgtgtggtcaagatgctrgagctcggcttatatttcggaccacatgaaggtgcacagccagggtcctcaccatgtctgtgagctctgcaacaaaggtacatgccgagggctgccggnagggccaggggcagagggtgggcgcctggccagacgccttgccacggatacgggttaagggtgctgtagccaagagctcgtggcgtctagattcctacaagaggtcaagggagcagcggggggacacctgaatgaacatcattagactctaagaagtcctggttggaagagatgatctgccagagaggttgaacctcctggtaatgtgtggggaaagcgggagtggaacttggctgctctggggaaggagtagtcaagaaagccagttccaggggtcacaaggcaaggtttccgctgcgcagccacaaggtcttgtctccagctcctggggcaggtggagtacacgggccgggctttaccagcacgcaccctgcgcatccacgcggtgaaggaccacgggctccaggccccgcggctgaccgcatcctgtgcaagctgtgcagcgtgcactgcaagacccctgcccagctggccggccacatgcagacccatctggggggggccgcccccctgtcccgggagacgccccccagccacagcccacctgctgagggggacccccgcacccaccaggtactggtgaggtttgtccaatggcggcggcagcggcagnggcggcagcggcagcagcggcagcagtagcagcccctcccacagctgtgggctccctctcgggggcggagggggtgcctgtgagctctcagccacttccctcccaaccctggtgagctccaagttggttgcgggggagaggggagaatggagtagagtcccttggtacaagctcctctcccccctcttttcccaccaactcctatttccctaccaaccaaggagcctccagaaggaaaggaggaagaaatgttttcttaggggaattcgctaggttttaacgatttgtttctcctgctcctcttctatcagacctgaccccacacaaacctgtcccctcggttgtgttgaagtcccctggacagtgggcaggggtggcagaggacacgagcagccactgcccgtaccccctctcctctctgtaagcccatgccctgtcttcccagggacttgtgagcctcttccctcgacggtcctcttctctccttccagtcctctccccctgctgtctgcagcccctccccggggagttggtgctttcttttcctttttttttttttccagggggagggaggagaggaaggagggggatcagagctgtcccaaagagggaaagcggtgaggtttgaggaggggcagaagcagggccggcaaaggttgtaccttcataaggtggtatggggggttggggtcaggccctgaacatcgtcctacttgagaatctgtcaggggaaaaagtcaaggggagcaggaggaagagccaggagggccagaggcagagaagagatggagtcttaggggccagggtgagcgaggggtccagggcctagaggtgcttcctgggggcgggggaatgcagccagtgtccccctcccctcttccaccccagctccagccctggtcttgtcttttcatccctcttccccacgacagaagaagttgtggccctggccatgtcatcgtgttcctgtgtcccctgcatgtaccccaccctccaccccttccttttgcgcggaccccattacaataaattttaaataaaatcctgaaaaaaaaaaaaaaaaaacncgagggggggccnggnaccca

SEQ ID NO: 366 - DNA, 1823 bp, Homo sapiens
ggcacgaggcaggrcggyggccaysgaagycggaatccgctgtgctcactgatccgcctccagggccaccgccatgtcgagccgcggtgggaagaagaagtccaccaagacgtccaggtctgccaaagcaggagtcatctttcccgtggggcggatgctgcggtacatcaagaaaggccaccccaagtacaggattggagtgggggcacccgtgtacatggccgccgtcctggaatacctgacagcggagattctggagctggctggcaatgcagcgagagacaacaagaagggacgggtcacaccccggcacatcctgctggctgtggccaatgatgaagagctgaatcagctgctaaaaggagtcaccatagccagtgggggtgtgttacccaacatccaccccgagttgctagcgaagaagcggggatccaaaggaaagttggaagccatcatcacaccacccccagccaaaaaggccaagtctccatcccagaagaagcctgtatctaaaaaagcaggaggcaagaaaggggcccggaaatccaagaagcagggtgaagtcagtaaggcagccagcgccgacagcacaaccgagggcacacctgccgacggcttcacagtcctctccaccaagagcctcttccttggccagaagctgaaccttattcacagtgaaatcagtaatttagccggctttgaggtggaggccataatcaatcctaccaatgctgacattgaccttaaagatgacctaggaaacacgctggagaagaaaggtggcaaggagtttgtggaagctgtcctggaactccggaaaaagaacgggcccttggaagtagctggagctgctgtcagcgcaggccatggcctgcctgccaagtttgtgatccactgtaatagtccagtttggggtgcagacaagtgtgaagaacttctggaaaagacagtgaaaaactgcttggccctggctgatgataagaagctgaaatccattgcatttccatccatcggcagcggcaggaacggttttccaaagcagacagcagctcagctgattctgaaggccatctccagttacttcgtgtctacaatgtcctcttccatcaaaacggtgtacttcgtgctttttgacagcgagagtataggcatctatgtgcaggaaatggccaagctggacgccaactaggctgagcaatgacagaaccagctgcaccatgtaccccaccttcagtttaaaagaaaaaaaaaatccccttcactcctactgggaggtgggacccctttcattttcagttttgctcatctagggaaaataaggctttggtttccagtttaattgtttttgaccttctaaaatgtttttatgttagcactgatagttggcattactgttgttaagcactgtgttccagaccgtgtctgacttagtgtaacctaggagattttatagttttattttaatgaaaccctgattgacgcacagcagtggggagaacagcgtcttttacctgtcaccgaagccaggaagccccgtttgtaagcgtgtgttgtggtgctttattgtacatcctccagtggcgttctttttactctaatgttcttttggtttcccccctcagaagaatcatgaatttgcaacagacctaatttttggttactttttgtcttattgatggatttgaaaatgaaagatttaataaggcaaagcagaatctgttgtccttaattatatttgcaatttggaatttgtgtgagttgatttagtaaaatgttaaaccgttaaaaaaaaaaaaaaaaaaaaactcgagactagttctctc

SEQ ID NO: 367 - DNA, 898 bp, Homo sapiens
  misc_feature (17): n equals a,t,g, or c
  misc_feature (25): n equals a,t,g, or c
  misc_feature (30): n equals a,t,g, or c
aaggggggggaaaattngagacacnttttnaaggtacgcccgcaggtaccggtccggaattcccgggtcgacccacgcgtscgctcctggggccatgaggctgtcactgccactgctgctgctgctgctgggagcctgggccatcccagggggcctcggggacagggcgccactcacagccacagccccacaactggatgatgaggagatgtactcagcccacatgcccgctcacctgcgctgtgatgcctgcagagctgtggcttaccagatgtggcaaaatctggcaaaggcagagaccaaacttcatacctcaaactctggggggcggcgggagctgagcgagttggtctacacggatgtcctggaccggagctgctcccggaactggcaggactacggagttcgagaagtggaccaagtgaaacgtctcacaggcccaggacttagcgaggggccagagccaagcatcagcgtgatggtcacagggggcccctggcctaccaggctctccaggacatgtttgcactacttgggggagtttggagaagaccagatctatgaagcccaccaacaaggccgaggggctctggaggcattgctatgtgggggaccccagggggcctgctcagagaaggtgtcagccacaagagaagagctctagtcctggactctaccctcctctgaaagaagctggggcttgctctgacggtctccactcccgtctgcaggcagccaggagggcaggaagcccttgctctgtgctgccatcctgcctccctcctccagcctcagggcactcgggcctgggtgggagtcaacgccttcccctctggactcaaataaaacccagtgacctcaaaaaaaaaaaaaaaaaaaaaaaaaaaaaaaaactcga

SEQ ID NO: 368 - DNA, 1117 bp, Homo sapiens
gccctgagccccgccatggtggtgccggaggaccagctgacccgctggcacccgcgcttcaacgtggatgaagtacccgacatcgagccggccgcgctgccccagccacccgccacggagaagctcaccactgctcaggaggtgctggcccgggcccgcaacctgatttcacccaggatggagaaggccttgagtcaattggccctgcgytctgctgcgcccagcagccccgggtctcccaggccagcactgccggctaccccaccagccaccccgcctgcagcctctcccagtgctctgaagggggtgtcccaggatctgctggagcggatccgagccaaggaggcacagaagcagctggcacagatgacgcggtgcccggagcaggagcagcggctgcagcgcttagaacggctgcctgagytggcccgcgtgctgcggagcgtctttgtgtccgaacgcaagcctgcgctcagcatggaggtggcctgtgccaggatggtgggcagctgttgtactatcatgagccctggggaaatggagaagcacctgctgctcctctccgagctgctgccggactggctcagcctccaccgcatccgcaccgacacctacgtcaagctggacaaggccgcggacctsgcccacatcactgcacgcctggcccaccagacacgtgctgaggaggggctgtgagcctgggggccactgtggacagacgtgggcttcagaagctcgctggcctgggcccaccagcattttcttttatgaacatgatacactttggycttcctttccccagcgcccctgagggccagaggcagatgtgggctgcaggctgcacagcccgagggtctctggctgcgggcggtgggccccttcatggggctcacctggtggattcacattaaaccggtttctgtgggcacctctgtccttgctgctggtggggaagggaagccagatccagcaccccctggggggccatcgggagtgtggctggrggtgaagggggctctgtggcaatatggggttgggtagtgtgggtggcaaggccatcccctctaatcttggaacctctgaatatgggaccttccacagcaaagggtgacttttg

SEQ ID NO: 369 - DNA, 2226 bp, Homo sapiens
  misc_feature (24): n equals a,t,g, or c
  misc_feature (35): n equals a,t,g, or c
  misc_feature (36): n equals a,t,g, or c
tataggagaaagctggtacgcccnccaggtaccgnntccggaattcccgggtcgacccacgcgtccgggggattattaaccacttagaatataaaattgtacaacaatttcacttgtttatttgcattttgttttttataactcttactcccttttcccctcaaaggagaactgtgtttatgaaactgtagttttgcctttggatgaaagggcatttgagaagactttaacaccaatcatacaggaatattttgagcatggagatactaatgaagttgcggaaatgttaagagatttaaatcttggtgaaatgaaaagtggagtaccagtgttggcagtatccttagcattggaggggaaggctagtcatagagagatgacatctaagcttctttctgacctttgtgggacagtaatgagcacaactgatgtggaaaaatcatttgataaattgttgaaagatctacctgaattagcactggatactcctagagcaccacagttggtgggccagtttattgctagagctgttggagatggaattttatgtaatacctatattgatagttacaaaggaactgtagattgtgtgcaggctagagctgctctggataaggctaccgtgcttctgagtatgtctaaaggtggaaagcgtaaagatagtgtgtggggctctggaggtgggcagcaatctgtcaatcaccttgttaaagagattgatatgctgctgaaagaatatttactctctggagacatatctgaagctgaacattgccttaaggaactggaagtacctcattttcaccatgagcttgtatatgaagctattataatggttttagagtcaactggagaaagtacatttaagatgattttggatttattaaagtccctttggaagtcttctaccattactgtagaccaaatgaaaagaggttatgagagaatttacaatgaaattccggacattaatctggatgtcccacattcatactctgtgctggagcggtttgtagaagaatgttttcaggctggaataatttccaaacaactcagagatctttgtccttcaaggggcagaaagcgttttgtaagcgaaggagatggaggtcgtcttaaaccagagagctactgaatataagaactcttgcagtcttagatgttataaaaatatatatctgaattgtaagagttgttagcacaagtttttttttttttttttttaagcacttgttttgggtacaaggcatttctgacattttataaacctacatttaaggggaatttttaaaggaaatgttttttcttttttttttgtttttcgagggggcaaggagggacagaaaagtaacctcttcttaagtggaatattctaataagctaccttttgtaagtgccatgtttattatctaatcattccaagttttgcattgatgtctgactgccactcctttctttcaaggacagtgttttttgtagtaaaatcactggtttatacaaagctttatttagggggtaaagttaagctgctaaaaccccatgttggctgctgctgttgagatactgtgctttgggagtaaaaaaagaaagttatttctttgtcttaaagaatttttaaaaaattagtcatgagacttattcatctttccagggaacatactgattggtcttaaaagactagacagttaagtaaaaggtggctggaacatctatttttctacaaaactggaaaaatgaacctggttctagaagaatgtacaccaaaataaaacatgtgaagcagtattgattctttattgggagtacatttttttaggtctcttaaactttaatttcacacagtaaattttgaatctcataaggaagcatatttgaacctagtcaatttaatcttagtgttcccttgaaaactttttttccctacaaaattttaagtgaaaaatacaatagtaaattaagattacactggggaaaaaaatgcaggtatcactttactccattgttatctgacctagagcttaattaagttttagaaatatgtaataccttccatcattccatcatccttaaattctgttaccaaataatggctaatgttacaaaaagttatactccagagacccaaagcttgacatttacctaatgtatgagaaaatattaccaattaacaataaagaatgatcatatttttaaaaaaaaaaaaaaaaaaaaaaaaaaaaaaaaaaa

SEQ ID NO: 370 - DNA, 3636 bp, Homo sapiens
  misc_feature (1937): n equals a,t,g, or c
caccaaggagcgcgtcaaacttgaagggtcaaagtgcaaagggcagcttttgatttttggggcaaccaactgggacttgattggtcgaaaagaagtgcctaaacagcaagctgcttaccgcaatctcggtcagaatttgtgggggccccacagatatgggtgcctggcgggggtccgggtgcggacagtggtctcgggctcgtgtgctgcacacagcctcctcatcaccacggaagggaagctgtggagctggggtcgaaawgagaaggggcagctgggacatggtgacaccaagagagtagaagcccctagactcatcgagggtcttagccacgaagkattgtgtctgcagcatgtgggcggaaccacaccttggccttgacggaaacgggctccgtgtttgcgtttggggaaaacaagatggggcagctgggccttggcaaccagacagacgctgttcccagccccgcgcagataatgtacaacggccagccaattaccaaaatggcctgtgggsstgaattcagtatgataatggactgcaaaggaaacctctattcctttgggtgccctgaatatggtcagctgggacacaactcagatgggaagttcatcgcccgggcacagcggatagagtacgactgtgaactagttccccggcgagtggccatcttcattgagaagacgaaagatggacagattctgcctgtaccaaacgtggttgtacgagacgtggcctgtggcgctaaccacacgctggtcctggactcccagaagcgagtcttctcctggggctttggtggctatggccggctgggcacgcagagcagaaggatgagatggtcccccgcctggtgaagctgtttgacttccctgggcgtggggcttcccagatctatgctggttacacctgctcctttgctgtcagtgaagtgggtggtctgtttttctggggggccaccaacacctcccgtgaatctaccatgtacccaaaagcagtgcaggacctctgcggctggagaatccggarcctggcttgtgggaagagcagcatcattgtggccgccgatgagagcaccatcagctggggtccgtcaccgacctttggggaactgggctacggggaccacaagcccaagtcttccactgcagcccaggaggtaaagactctggatggcattttctcagagcaggtcgccatgggctactcacactccttggtgatagcaagagatgaaagtgagactgagaaagagaagatcaagaaactgccagaatacaacccccgaaccctctgatgctcccggagactcctccgactccacacctctcgcggcagctgtcatttccatgtgcactgggacgggaagtcaaacgaggaatttaaaaaagcaaaagttgaccgaagtgcatttttgtttagactccctgaggttccgttttacacatgatccaacgttaactacctttttttctgtatgctttccaaagtcctttttttcccttaatgttgaattaaaatacttgctcatagttgatttaccattcctacaaaagaggcagaaactttgagcaatctaggttttttttttttttaagttttttctttcttcctytcctgaatacactccccaaaacacccctttccagttacaattagcatcgtgatccaagcagatgccacatggaagaggaatcgccatttactcagaaaaaatgtcccttacaggaaccggcagcagctaggcagtcaccggcccgcctccatccaaaatcacgctcgcgtgcttcggaagcatccgggtcactccttctccgctttttcttgcagatgggcctaggccggtgtcggttctgtttctccccttggctgcctgtacgcccacagccttctggctgcgacattatagaatcggccgtgtcccccctggtggggnattggggatctgtgtttagccatttatatctactttagctgttaaagaggtccaaatgaaaatcaggtgattgtggaaccatggggacttgggggtggggcagaggtgggaacatttgtatcagttgagtcagcttggtggctccctgtggagcagggctgagccttgtcacgcgcactcgccaattaagagatggaccagccagcagtcaagtgcattctccagtccttgcaagaaggatcagccctttctgtgccagcctcgatcgccttgtgctttggtctctttttctcccccccgcctggatcctgcctcgcgcgggccgtcctgttgctgagactcggggtaccgttctgctgacccagctccctttagtcacgtttgcttggctctggtaccaaatagttgggattaccgaagagtccccttccttgcgtgtcagcacggatgctgtgactgccacctgcgtcctcgtcaagtgcccgagctcgccgccgtgtgtgctgcgctgagtgagttatgaggtgcctttcccggaaccctcctctcgcctggacccaagagaggcgacagctgtggctggggctcttggtttccagagggtctggactggtttgggtgctttaaaatagatatttagttcagtggtgcttatgggggagatgggactagaacttaagtgtgagacttgggtggatgggaaagttaaatattggtctcttcaagttttttttttcttttgctttgttaccacttgtcactgtctccatgttaaaatgccaaaaatgatgtagttgttgttgcttttttccctattttccaccccagtcgctccttaccgtgactcctgcccttggagggcatgtagcagtgtctgtcctgccagtcccaaggccctgtgggaggagactggcctgcatctctctaagacttagtctgacgccacgcgcatctcttgttctgtgttcaatcagtagtccaggggagaagcttctgctacttcagagctttgctaaactaacctaatttgtccaaatcaccccaaaaccaccatctctgacgtaagcttccatgcgacagcctgatccgtttccctggacaggtctctttcctggaatgcagcccaggcacctgtgctcctggcacccttgaggtctctcctttgagccgtggtcaccgagagggttgaggacgcagcacccgaggtcccagcctttgcaggagcctccctgggcttagctggacttagatcttcggtggcctcatgtaaacgtggcagccagcctcttctagaaccctagcccagggactggagcaggaaagggaccttcaaagtgaagactgccttgtcccgcagctccttctggcttagattgaaamatgggcttcctaatgggttaaatcctttaaaacaaggagttgtgggggaagggtgtcgtgcactcctagagaaaggtacacagttgcccggttgggaatgtgcttggcgctgactgcgggcatctgactggtcttccagctcaggaaaaagaatttgaaagaggcttagcgtgaaggggaatcaaagaggaggttgtgatttggtcgaaggtgcctggtttagtgctgtaattgtcttattattttttttatatatatatttcttggagtaaacattttaaataaacaacattgtctactgtcaaaaaaaaaaaaaaaa

SEQ ID NO: 371 - DNA, 4039 bp, Homo sapiens
  misc_feature (1085): n equals a,t,g, or c
aattcggaacgagggtgaagcacaaggattaagttggaaaagctgtaaattgcatgtgcatatttgtctattttttctataagttttattgcaagaggtaaagaagaaaactatatatatatatcttatttagataatctcagtaccttttctggcatttttgccctgtataggttgacttggcaattcggcctttttagaggcattaactactcctcgtaagtgttgcatttacatggctgtttagaaaactgctgcccaaatttattttatatttttgtacagattctgcagtttatgatattgttttctaaaaacaaatgctgtttatacatatgagatagctattttgataggatttgctcacatagttcctgcaaacttcagatgtacaagttgcacttgtacttttatagagttgtaatgttttatatgtgtatggtgcaagagaaaattggatcaaatcaayctgcagttgatgtccccaaatgcaaacacaggcacacacatgcacacacccataaacacacacacagtgcatttaaraaagggccaggtgatatcacacccaaatttcacaagcactgaccccctggcaccaacacccgccagtactgtgacttccaaagccagagccacatgtgctcatcaaacttgcattaagcagttggcgggagatggctgtggagctgggggtttaagtgatggttctcttttgctccctcttytgagggtaaagctactgtctttcttaagagtgtatttatgccaagtttgcgcttttaattgtttttattttgtwttttaatgaaaacccagatctttcctttttggcataatttttatgatgacctgaaattttacatccgaacaaaattttacatccgaaaagcaaccaacttcttcatggaactcagccctgttgcaatgcttagggcccttaaagaagaaaatctccccagaaggcatccatcatgttgcttaattgtcttctgcagcttcctttccctagagctttccctgtgttgctaagagctgraaatggcatcttcgtgatcaccacagtgagcttggctcgcctcggncggcccggggatgcactcttacaacatgtgtgactcttgaacctggagttcatcacattacgtcacagcttcccatctggttgctttcctgagtcagctacttcacacttgtcaaggctgttttaccccaaaactcagacaggactttctatgcatgttttccctcctccccccaattccccccccatcaccttatctcccaggacacacttgagaagtagctttttattcctagtggtgtacatttaattttaaaaaggttgcaatgtatcatgcttgttgccgaaactgtttatggccttcttgtttcagttttttcttttcttccaatggtactttagctgttgagtgcaggttacaacctatattgttatgcagatggcttctttaggaataacttttatatttatttaaaaatttttaaattatgggatgttttgttgttgttgttgtctttgttgttggtcatttgtcaatattcagtcaccaattctgctcacttcttgccatggataaaattgggtctttctggctaattaaaaaagacaactttataaaatggcactttaagcaagccatagttagttttatttttgtaatgcacatggcaaagcaaagacgtttgtgatgaaggaactgctcatctaagcaaaagatttgagtatgatatgataaaggctttctacattctaatttactttttccccccacttgaatgtgttttaaaggctaattatcagctcagtagagcagtgagaaactgatcaaattgcacttgttctcctacaagcaacctccacgcagacacctcgtactgctacaggtgtgtcatttcctttaataggaccagggaccatgtaactgaggtgagggttgtagtaratgcttccagtgtcagtatgcctgttaattttaagagcttccctttcttgcagagaacaagtctgcccagattccatgctttctataactggaggacctggcaaacctgccgcatgctgcacacatctacctacgtacacatatacaatagtattgatgattctgaacaataacagggtaaaacagttggtttgccattgttaaaaactgatttacagtaacttacaacaactgtacttttgttggattagcaaatcatgtgtttaaacaaatcccatatgttgggcaacagttcaaataagcacggagaagtgttgcccaaacttggttctctgactcttatgtatttgtaaggctgggcttcaaaatcaaaacaaaaaccccaaaaacagcaggcaaatgctttttaactctgacaccgttgccataaatccctgatactcaaagtctaacaagaaagacatggaaaattagcagcccattttcagaaagatcaaaatgatctagggttctaattgcttttgcatcctattcttacaaagtgatgtcccaacagggaacagtaggagctggagtgggatctccaagtcccagtttgagtgtgggatgtgcttccagcagtgccttccctttatgaaagacatcacatggcatccagggccaggcaggcagcttgaggtgcctttacgagaaaaccgagctggggctgggagaggacagttattgacactgatgtgcaatgaagtgacaagatgagagcagaatcgtaagagctttgaatttgaagtgagttttttccccccataagttatttattccttttttctgtgtaaatatatttattttactgtggagcgctaacatctggatcgtaacatgtgcagaatgtatggtaggaatgtattctcttgtaggaatgtaaatctgtattaaaagggggtccaagccaggcccccaggtcttctcattgtatgcacagtccgcattcatttttactcttctctaatatgggtctatttgaaatatgcaaaaggtatgaggaatgttttaatacctccaaatttttaagaaaagcatcaaagggttgatattttttaaagtttttttagtagcactttctctggatgacagaaggggcaaccacatgggcacccttgttcataccaaagggtgagcagtggccagagcctcctctgcacctctcgagtgtctttaccaattgagctttttatcgccatagccccttggagtgccccagctgccctgaggtcaatcaaggaaaatttcttaatgaaataagctccaaagagccaaagtatcaacttacagatcgtttttaaagcttaaatttatgaaccacctttgtggtaaacaatgaattatgaataccgcagggcagccttcttaaatgacaaatgtaaaaaaaaaaaaaaaaaaactctacttcgtgcagcaattgctactctatacgaattgtcttaatttgaaaaccttgctgttacaaattggacctttatacattttctgaaaacaatgaaaagagtatatttaaccttttctggctgtaaatggttaccttcctgtaactgccccgcacctggaggcatggagttgtgtgcatcctgcttatgtacaattgttttcagtgtttctaagaatgagtctgaatggttcttgaaaattagccaggatcaaatgctattgcagacaaagccaataaaaagttggacttcttttggggataacaagttttggaagagaaatgcaggccatatgtgcgcatgaccgagattttgaaaaaagatgtacatagtgacatgtttggtgcatggtttttgaggagggcttttgtcaaaaaggaggtataacctttcccccacagacctgagagctgtgccttttctatgcaatattacagacgttacatcggaacccagatggctgtattcacatgtaggtttgggctgtaatctaaacaattggacagattaaatgtacatggaaatgagcagtcttacttttgtagttttatattatacaataaacagttaaaagatgaaaaaaaaaaaaaa

SEQ ID NO: 372 - DNA, 1599 bp, Homo sapiens
ccatccagctggggatgcagagcacctgatgcacctggaacaggtgctctgcatccccagctggatggcaaaattcttttcttggacacttgaacccatcttctcttcttcagaacccaccagcgaacagaattgggatgggagccacgctggacatccagagacagcagagaatggagctgctggaccggcagctgatgttctctcagtttgcacaagggaggcgacagagacagcagcagggaggaatgatcaattggaatcgtctttttcctcctttacgtcagcgacaaaacgtaaactatcagggcggtcggcagtctgagccagcagcgccccctctagaagtttctgaggaacaggtcgcccggctcatggagatgggattttccagaggtgatgctttggaagccctgagagcttcaaacaatgacctcaatgtcgccaccaacttcctgctgcagcactgatagtcccaggccaacactgggaccggaccggcagccgagtgacagtgcgtggtccccaccatcagatcagcccggggaccgagcatctctggtgctgatgttcttgtgggaagagggaggttccaccgcacccctgccctcaaccgcaagactgttgccgttttagtgtggagataagtttgccattacattagcatgtattttctatctatattttttattgggcattttccctaggttggagagtcagcactcgttttgaatgtgtttaaaatgcattaaaatggaagatttctgcaggcagttgaatggcactccagatggggaattgctgtaaccctcttactgtaacatgtcatctcctgcgtcgtgatggggagagggtaatgttacttcacaaaggacatgtcagatccttcttcatggacttttttagttactgttttttctctcaaacttgttttcgaatctcctgggagtgagggagaaacagggagctgaatcctcccccaagctgttccaggccagaggactctgcagtaccttctcctacatctagtaacaaagaatggtgataaccatgcactggttcaaggttctggagttctccatgaaacttgggttaattttgctcagagtatccagagttagccactaggctgcgggtgaaatgggatggagaagaacaacagcaggcttcctggagccacatgggctgactagggcactctgtggctggcctggcatgggctcagcccaggaagaggagaaacgatcccttgcctgcccctccctgtggcagggctaactgcctggccctcctggctcgcagccagccagccccctggcagcaggttctcctcagggcttgggtcttcaacctgtggcgacaggaggcagggcagactgtggaggacaggatgcaggtcagggagagggaaggcaggggtggaccgccatgagcatgaaaagacccgaagcaagttgactcttgcaatgtgcaactgttatgttctgcaaaatgagcaacgatgtatcaaattgatgcaaatttagatgttgatacttacaataaagtttttaatgtgttttaaaaaaaaaaaaaaaaaaaaaaaaaaaaagggcggcc

SEQ ID NO: 373 - DNA, 464 bp, Homo sapiens
ctcaaaaatcaccagaaaactcatactagtgaaaaatcctataaatgtaatgaatgtagaaaggcctttagttactgctctggtcttattcaatgtcaggtcattcatactatagaaaaaccttatgaatacggtaaatgtggcaaagcctttaggcagaggacagaccttaaaaaacatcagaaaatgcataccgargagaaaccctatgaatgtaatgaatgtgggaaagcctttagccagagcacatatcttacaaaacaccaaaaaattcatagtgaagagaaatcaaatatacatactgagtgtggggaaaccwttwgrcaaaactcttcttttttacaacaataaaaacctcacactggagagattctctgaatgccttaagaatttggttaatatggagacccttcccaggggaaccagaaggaggatcgtgaaaacctgttgactacttagatgat

SEQ ID NO: 374 - DNA, 890 bp, Homo sapiens
  misc_feature (886): n equals a,t,g, or c
ggctgctggaggcgagggcttcggaagtcttcatgctagtctcgtggggttccgcggtgtcgtcgctggctgtgcgcgtcatttccgggcgtcacgtaacggagtggccaacggcctgcagagcaacatgcccaagttttattgtgactactgcgatacatacctcacccatgactctccatctgtgagaaagacacactgcagtggaaggaaacacaaagagaatgtgaaagactattatcagaaatggatggaagagcaggctcagagcctgattgacaaaacaacggctgcatttcaacaaggaaagatacctcctactccattctctgctcctcctcctgcaggggcgatgataccacctccccccagccttccgggtcctcctcgccctggtatgatgccagcaccccatatggggggccctcccatgatgccaatgatgggccctcctcctcctgggatgatgccagtgggacctgctcctggaatgaggccgcccatgggaggccatatgccaatgatgcctgggcccccaatgatgagacctcctgcccgtcccatgatggtgcccactcggcccggaatgactcgaccagacagataaggatagaggggaggccttattgtatcggttttatattacctgttctgcttcaccaggagatcatgctgctgtgatactgagttttctaaacagcataaggaagacttgctcccctgtcctatgaaagagaatagttttggaggggagaagtgggacaaaaaagatgcagttttcctttgtattgggaaatgtgaaaataaaattgtcaactctttcagttaaaaaaaaaaaaaaaaaaaaaaaaaaaaaaaaaaaaaaaaaaaaaaaaaaaaaaaaaanaaaa

SEQ ID NO: 375 - DNA, 1874 bp, Homo sapiens
gttcaggaacttaggctagaaaggaacacagtaaactgaattgatccgtttagaagtttacaatgaagtttcttctaatactgctcctgcaggccactgcttctggagctcttcccctgaacagctctacaagcctggaaaaaaataatgtgctatttggtgaaagatacttagaaaaattttatggccttgagataaacaaacttccagtgacaaaaatgaaatatagtggaaacttaatgaaggaaaaaatccaagaaatgcagcacttcttgggtctgaaagtgaccgggcaactggacacatctaccctggagatgatgcacgcacctcgatgtggagtccccgatgtccatcatttcagggaaatgccaggggggcccgtatggaggaaacattatatcacctacagaatcaataattacacacctgacatgaaccgtgaggatgttgactacgcaatccggaaagctttccaagtatggagtaatgttacccccttgaaattcagcaagattaacacaggcatggctgacattttggtggtttttgcccgtggagctcatggagacttccatgcttttgatggcaaaggtggaatcctagcccatgcttttggacctggatctggcattggaggggatgcacatttcgatgaggacgaattctggactacacattcaggaggcacaaacttgttcctcactgctgttcacgagattggccattccttaggtcttggccattctagtgatccaaaggccgtaatgttccccacctacaaatatgttgacatcaacacatttcgcctctctgctgatgacatacgtggcattcagtccctgtatggagacccaaaagagaaccaacgcttgccaaatcctgacaattcagaaccagctctctgtgaccccaatttgagttttgatgctgtcactaccgtgggaaataagatctttttcttcaaagacaggttcttctggctgaaggtttctgagagaccaaagaccagtgttaatttaatttcttccttatggccaaccttgccatctggcattgaagctgcttatgaaattgaagccagaaatcaagtttttctttttaaagatgacaaatactggttaattagcaatttaagaccagagccaaattatcccaagagcatacattcttttggttttcctaactttgtgaaaaaaattgatgcagctgtttttaacccacgtttttataggacctacttctttgtagataaccagtattggaggtatgatgaaaggagacagatgatggaccctggttatcccaaactgattaccaagaacttccaaggaatcgggcctaaaattgatgcagtcttctactctaaaaacaaatactactatttcttccaaggatctaaccaatttgaatatgacttcctactccaacgtatcaccaaaacactgaaaagcaatagctggtttggttgttagaaatggtgtaattaatggtttttgttagttcacttcagcttaataagtatttattgcatatttgctatgtcctcagtgtaccactacttagagatatgtatcataaaaataaaatctgtaaaccataggtaatgattatataaaatacataatatttttcaattttgaaaactctaattgtccattcttgcttgactctactattaagtttgaaaatagttaccttcaaaggccaagagaattctatttgaagcatgctctgtaagttgcttcctaacatccttggactgagaaattatacttacttctggcataactaaaattaagtatatatattttggctcaaataaaattgaaaaaaaaaaaaaaaaaaaaaaaaaaaaaaaaaaaaaaaaaagc

SEQ ID NO: 376 - DNA, 2018 bp, Homo sapiens
  misc_feature (1997): n equals a,t,g, or c
  misc_feature (2012): n equals a,t,g, or c
gccacatcccggcagccctcctacckgcgcacgtggtgccgccgctgctgcctcccgctcgccctgaacccagtgcctgcagccatggctcccggccagctcgccttatttagtgtctctgacaaaaccggccttgtggaatttgcaagaaacctgaccgctcttggtttgaatctggtcgcttccggagggactgcaaaagctctcagggatgctggtctggcagtcagagatgtctctgagttgacgggatttcctgaaatgttggggggacgtgtgaaaactttgcatcctgcagtccatgctggaatcctagctcgtaatattccagaagataatgctgacatggccagacttgatttcaatcttataagagttgttgcctgcaatctctatccctttgtaaagacagtggcttctccaggtgtaastgttgaggaggctgtggagcaaattgacattggtggagtaaccttactgagagctgcagccaaaaaccacgctcgagtgacagtggtgtgtgaaccagaggactatgtggtggtgtccacggagatgcagagctccgagagtaaggacacctccttggagactagacgccagttagccttgaaggcattcactcatacggcacaatatgatgaagcaatttcagattatttcaggaaacagtacagcaaaggcgtatctcagatgcccttgagatatggaatgaacccacatcagacccctgcccagctgtacacactgcagcccaagcttcccatcacagttctaaatggagcccctggatttataaacttgtgcgatgctttgaacgcctggcagctggtgaaggaactcaaggaggctttaggtattccagccgctgcctctttcaaacatgtcagcccagcaggtgctgctgttggaattccactcagtgaagatgaggccaaagtctgcatggtttatgatctctataaaaccctcacacccatctcagcggcatatgcaagagcaagaggggctgataggatgtcttcatttggtgattttgttgcattgtccgatgtttgtgatgtaccaactgcaaaaattatttccagagaagtatctgatggtataattgccccaggatatgaagaagaagccttgacaatactttccaaaaagaaaaatggaaactattgtgtccttcagatggaccaatcttacaaaccagatgaaaatgaagttcgaactctctttggtcttcatttaagccagaagagaaataatggtgtcgtcgacaagtcattatttagcaatgttgttaccaaaaataaagatttgccagagtctgccctccgagacctcatcgtagccaccattgctgtcaagtacactcagtctaactctgtgtgctacgccaagaacgggcaggttatcggcattggagcaggacagcagtctcgtatacactgcactcgccttgcaggagataaggcaaactattggtggcttagacaccatccacaagtgctttcgatgaagtttaaaacaggagtgaagagagcagaaatctccaatgccatcgatcaatatgtgactggaaccattggcgaggatgaagatttgataaagtggaaggcactgtttgaggaagtccctgagttactcactgaggcagagaagaaggaatgggttgagaaactgactgaagtttctatcagctctgatgccttcttccctttccgagataacgtagacagagctaaaaggagtggtgtggcgtacattgcggctcctccggttctgctgctgacaaagttgtgattgaggcctgcgacgaactgggaatcatcctcgctcatacgaacttcggctcttccaccactgattttaccacacactgttttttggcttgcttatgtgtaggtgaacagtcacgcctgaaactttgaggataactttttaaaaaaataaaacagtatctcttaatcactggaaaaaaaaaaaaaaaaaaaaaaaaaccncggggggggccccgnacccca

SEQ ID NO: 377 - DNA, 818 bp, Homo sapiens
  misc_feature (818): n equals a,t,g, or c
atcgacccacgcgtccggagcggttgcgcagtgaaggctagacccggtttactggaattgctctggcgatcgaggggtcctagtacaccgcaatcatgtctattatgtcctataacggaggggccgtcatggccatgaaggggaagaactgtgtggccatcgctgcagacaggcgcttcgggatccaggcccagatggtgaccacggacttccagaagatctttcccatgggtgaccggctgtacatcggtctggccgggctcgccactgacgtccagacagttgcccagcgcctcaagttccggctgaacctgtatgagttgaaggaaggtcggcagatcaaaccttataccctcatgagcatggtggccaacctcttgtatgagaaacggtttggcccttactacactgagccagtcattgccgggttggacccgaagacctttaagcccttcatttgctctctagacctcatcggctgccccatggtgactgatgactttgtggtcagtggcacctgcgccgaacaaatgtacggaatgtgtgagtccctctgggagcccaacatggatccggatcacctgtttgaaaccatctcccaagccatgctgaatgctgtggaccgggatgcagtgtcaggcatgggagtcattgtccacatcatcgagaaggacaaaatcaccaccaggacactgaaggcccgaatggactaaccctgttcccagagcccacttttttttctttttttgaaataaaatagcctgtctttcaaaaaaaaaaaaaaaaaaaaaccccggggggggcccggaaccaaattn

SEQ ID NO: 378 - DNA, 2565 bp, Homo sapiens
  misc_feature (1508): n equals a,t,g, or c
  misc_feature (2565): n equals a,t,g, or c
ggcacgagctcgtgccggggccatagctgttactgaaggaagtagcctacgtccacgcctacaactgaagtctcttgacaaacacctcacccctgcctccgggatgaaagggggtaacctagacctgaatgggcttgaccatctcacaactgctcgcgtgacgaccgcattcgtggcaggtaagaagattgctgtatcaactcaagaaagcagtaacttcactgtctttgtattttgaattgcaacaacaactttgatatcaacaatgaagcaatgatatctaagaacmaaagartatttgccaacagtcatcataatatcaagtgattgtataagcagaaacaagctgtcacagacctgtgcgtcagctaatatatggagaatgcttcttctgatactatttacttagaggcagttttaatataaatcatttcaattatatctacatcaaataaaataaaaatgagtgaagcccccagattcttcgttggaccagaagatacagaaataaatcctggaaattatcgacatttctttcaccatgcagatgaagacgatgaggaggaagatgattctycaccagaaaggcagattgtggttggaatatgttccatggmaaagaaatccaaatccaaaccaatgaaggaaattcttgracggatctccttatttaaatatatcacagtagtagtatttgaagaggaggttattttgaatgaaccagtggaaaactggcctttatgtgattgtcttatttctttccattctaaaggatttccactggacaaagcggttgcctatgcaaaactcaggaatccatttgtaatcaatgacttgaatatgcagtagctcttgaaagcagctttgagttagaagtatgtgtgttacaccctcacattagtgtgctgtgtggggcagttcaacacaaatgtaacaatgtatttttgtgaatgagagttggcatgtcaaatgcatcctctagaaaaataattagtgttatagtcttaagatttgttttctaaagttgatactgtgggttatttttgtgaacagcctgatgtttgggaccttttttcctcaaaataaacaagtccttattaaaccaggaatttggagaaaaaaaaaaccctggttttttatttttgtattttattattgtttacttcaaactttgttttacagcgtcctccacaaaacctctagaatgcactagatatatttttcttggagtcataatcatgatgcataccaacacaacactactcaaattatatttcattgagatgcatgttgcattgaggagtcaacttgacatagagtggagactttttcaaaatggcttttacatcctaatgaaagtttgggaagtatatcctctctgccttttcatcagtgctttgtggtccagctggcaccctttctgaggtttgtgttttgtgctaaatggttttgtccttaaataggagaggctcaaaaacatcaagatttcaggaaaatggcgacastgncataatggaacccccctgcttctattttgttcttttaattactatttatagccccagttaccttctgaattctgaagtgtatatacctccatgttcctgaaaacaagaaaactcttacttcctgatawtccatagactgccttcccaggtgattgagaacatagagaatgttacacatttattttactctaaatgatcttttacccctgttagctaatctttgtgttttcctcaactttattaattacagtgattgcatttttagcatccagttgtaagatgaatatattaaacagctaccagtgttggtgatacctcatccttgaaaggcttagttcatttgtgttttatacttcagtttttccagcatagcagaaaatgccgcttataatttttgtgcacacaaaccttggattcccctgtaaagttgctattgtttcatagcatgcggcactggccttttttcatcctactcattacaggcaaaactcatgtcttatttatgaggattttatagatcattttctgtaacaggtgacaaaagcagaaaagaatgaagaggctgaagtatgaactacccttggagcccatatacatgatataggcaatttcttttgtatgttaattcrgtcaaaaatactacccacttgatgttttctaatctgatgtgagctcatgttacacagacttttagtaagtaacccgtgactagaaaataaactggatgcttaggagagagtgtcagatgtataagatgctaataaaacctgtttaatattattgttagctgtaagtttttgggaaatactgaacaaattagtccacaatcaagtgtctacttttcccttcactgtagggcctctccctgcacagagcagtctgtttagctgtgaacaccacaatctgcagatgttcaagtcccttacataaaatggcatagtatttatatgtaacctatgcatattctcctgtatattttaaatcatctctacattaaaatacctgataaaatgtaaaaaaaaaaaaaaaaaaaaaaaaaaaaaaaaaaagggggggn

SEQ ID NO: 379 - DNA, 1680 bp, Homo sapiens
ccaaagtgctggaattccaggcatgagccactgcgcccagtctacacactaattcttgttagcccaacagctgttctgttctatctacccctcatttcacgctcaaggagtcatacctagaatagttacacacaagagggaaactggaagccaaacactgtacagtattgtgtagaaagtcacctccctactccttttattttacatgagtgctgatgtgttttggcagatgagctttcagctgaggcctgatggaaattgagataacctgcaaagacataacagtatttatgagttatatcttagttcttgaaattgtggaatgcatgattgacaatatatttttaatttttattttttcaagtaataccagtactgtttaactatagccagaactggctaaaatttttatattttcagagttgaagttggtgaagacattcatgatttaaacaccagatcctgaaaggggttaaatctactttgaaatgaatctgcaatcagtatttcaaagcttttctggtaattttagtgatcttatttgattagactttttcagaagtactaaataaggaattttaacaggtttttattaatgcacagataaatagaagtacagtgaggtctatagccattttattaaaatagcttaaaagtttgtaaaaaaatgaatctttgtaattacttaatatgttagttaagaacccgtcaagcttatatttgctagacttacaaattattttaaatgcatttatcttttttgacactattcagtggaatgtgtaagctagctaattcttgttttctgatttaaagcacttttaaatcttatcctgccccctaaaaacaaaaggttttgatcacaaggggaaatttaagattgttaaccctgtttttcagaagggctactgttaattgcacataaacatgaaatgtgttttcccctgtgtactaacacattctaggcaaaattcaaacttatagtggtaaagaaacaggttgttcacttgctgaggtgcaaaaattcttaagacttctgtttgaaattgctcaatgactaggaaaagatgtagtagtttactaaaattgtttttctaccatatcaaattaaacaattcatgcctttatagggtcaggcctacaatgaataggtatggtggtttcacagaattttaaaatagagttaaagggaagtgatgtacatttcgggggcattagggtagggagatgaatcaaaaaatacccctagtaatgctttatattttaatactgcaaaagctttacaaatggaaaccatgcaattacctgccttagttcttttgtcataaaaacaatcacttggttggttgtattgtagctattacttatacagcaacatttcttcaattagcagtctagacattttataaacagaaatcttggaccaattgataatatttctgactgtattaatattttagtgctataaaatactatgtgaatctcttaaaaatctgacattttacagtctgtattagacatactgtttttataatgttttacttctgccttaagatttaggttttttaaatgtatttttgccctgaattaagtgttaatttgatggaaactctgcttttaaaatcatcatttactgggttctaataaattaaaaattaaacttgaaaaaaaaaaaaacga

SEQ ID NO: 380 - DNA, 1267 bp, Homo sapiens
  misc_feature (4): n equals a,t,g, or c
  misc_feature (214): n equals a,t,g, or c
  misc_feature (1165): n equals a,t,g, or c
  misc_feature (1255): n equals a,t,g, or c
  misc_feature (1262): n equals a,t,g, or c
aagnaagaaaaccacaactaaaactggaaatgtatattttgtatatttgagaaaacagggaatacattgtattaataccaaagtgtttggtcattttaagaatctggaatgcttgctgtaatgtatatggctttactcaagcaratctcatctcatgacaggcagccacgtctcaacatgggtaaggggtgggggtggaggggaatgtgtgcancgtttttacctaggcaccatcatttaatgtgacagtgttcartaaacaaatcagttggcaggcaccagaagaagaatggattgtatgtcaagattttacttggcattgagtagtttttttcaatagtaggtaattccttagagatacagtatacctggcaattcacaaatagccattgaacaaatgtgtgggtttttaaaaattatatacatatatgagttgcctatatttgctattcaaaattttgtaaatatgcaaatcagctttataggtttattacaagttttttaggattcttttggggaagagtcataattcttttgaaaataaccatgaatacacttacagttaggatttgtggtaaggtacctctcaacattaccaaaatcatttctttagagggaaggaataatcattcaaatgaactttaaaaaagcaaatttcatgcactgattaaaataggattattttaartacaaaaggcattttatatgaattataaactgaagagcttaaagatagttacaaaatacaaaagttcaacctcttacaataagctaaacgcaatgtcatttttaaaaagaaggacttagggtgtcgttttcacatatgacaatgttgcatttatgatgcagtttcaagtaccaaaacgttgaattgatgatgcagttttcatatatcgagatgttcgctcgtgcagtactgttggttaaatgacaatttatgtggattttgcatgtaatacacagtgagacacagtaattttatctaaattacagtgcagtttagttaatctattaatactgactcagtgtctgcctttaaatataaatgakatgttgaaaacttaaggaagcaaatgctacatatatgcaatataaaatagtaatgtgatgctgatgctgttaaccrragggcagaataaataagcaaaatgccaaaaggggtctnaattgaartgaaaatgtaattttgtttttaaaatattgtttatcttttatttagggggggtgggtaattattagttaagttttttttaanaaaaaanaaatt

SEQ ID NO: 381 - DNA, 1031 bp, Homo sapiens
  misc_feature (1015): n equals a,t,g, or c
ggtccaggattctagcagtcctggggcactgacctttgccagctacctgggggagggcttgccactggaaaacctttcaggccgcccccatcagtgggctccaaagtaaatggctgaaaacaaaaatgtttcacttcctaacagttttcctttttccactgtgtgactgaaagctcctatatcattttatatttctgaatctataaaacaaaacaaacaagcctgamagtgtctggargarccaaaggtggcctccctgtccccaaatatattggctatatgagagtaattttacccctctacgtacctaaaggcacccagttcactagtctgtggggtcctggagcctgtctcttctttctggaggttcaaactgaatagcaataattacgttacccaaagcatgtggaggaaaagtgaaaccagccacggagacgctggcccacgggctcggcctgcggtgtggcctgctttgctcaccagcgtcagccgctcatttccttctcatgaagtcccatctggtcatggggacgagggccgggagggcaccgggtagccttttcacacttggggattaggggagtgagaaaagatttgggccatgcatgcaaagtcaaagtttaaaattttatccttttcaaatagatgatataatatacctatacatgatataatatttgtatatatgaaatctctctatatttgtttawtttgagccattcaatctaaaccaatgtacaggtgtacaatgaaaaatttaaatgcttagttatttttcccaacacagtgtaaagtcaccctcctctgagagtgggatgtgcagagttttgatgttgcagctttgctcacttcctggcaagggcaggtcatgcctcaatttgtaatgggagtctggggtaagggtgggggttgaaagttgttatctttaaatacatgtacaaatcgttgtcaaaagtaacgttattaaaatagatttattatccctgaaaaaaaaaaaaaaaaaaaaaaaaaaaancccgggggggggcccc

SEQ ID NO: 382 - DNA, 1597 bp, Homo sapiens
  misc_feature (1577): n equals a,t,g, or c
  misc_feature (1579): n equals a,t,g, or c
  misc_feature (1597): n equals a,t,g, or c
atcacgtggacgctactcgctatccccggcctgttggcttcttccgcgctggagtatccagataggcgacacgccgrcgggcggctgaggcgggaatggctgctgtactgcagcgcgtcgagcggctgtccaatcgagtcgtgcgtgtgttgggctgtaacccgggtcccatgaccctccaaggcaccaacacctacctagtggggaccggccccaggagaatcctcattgacactggagaaccagcaattccagaatacatcagctgtttaaagcaggctctaactgaatttaacacagcaatccaggaaattgtagtgactcactggcaccgagatcattctggaggcataggagatatttgtaaaagcatcaataatgacactacctattgcattaaaaaactcccacggaatcctcagagagaagaaattataggaaatggagagcaacaatatgtttatctgaaagatggagatgtgattaagactgagggagccactctaagagttctatatacccctggccacactgatgatcacatggctctactcttagaagaggaaaatgctatcttttctggagattgcatcctaggggaaggaacaacggtatttgaagacctctatgattatatgaactctttaaaagagttattgaaaatcaaagctgatattatatatccaggacatggcccagtaattcataatgctgaagctaaaattcaacaatacatttctcacagaaatattcgagagcagcaaattcttacattatttcgtgagaactttgagaaatcatttacagtaatggagcttgtaaaaattatttacaagaatactcctgagaatttacatgaaatggctaaacataatctcttacttcatttgaaaaaactaraaaaagaaggaaaaatatttagcaacacagatcctgacaagaaatggaaagctcatctttagtttcagattaaagaaagctttgttttattttgctttsagagaatggtatgttttcttaactataggttattttatagagaatataaaagtataaaacattaaaaataaccctagatatactttaaaataatgttatatttatgctaaaatatgtaaattacactatacaaccatatgataggttatttctctaaccttgtcttctaacgttttaccaaaaattcataatctaatagtttatcagttttcaatagattaaataaaatgattactttaaaaataataaaatttatctaatttaaagttgatattatttttggccgttagttatctattactagtgatcagttatactgttttctatagctactttatttaacagcacagatttctatgcacctttactctttcctcaacccttgtctctatctgtacataattgctttgtcttgatgtttctatcaactatatcakgactatctattggttccataactctgtatcatgtgtattttcttattctggtataccacaaatgattcatgcaaatgaatttttggtgattgaaaaatattaaattcccaatttaaagtaaaaaaaaaaaaaaaaaaaaangnccccgggggggggccggn

SEQ ID NO: 383 - DNA, 175 bp, Homo sapiens
  misc_feature (95): n equals a,t,g, or c
gtgagtggtgactatgggcatcctgtgtatatcgtgcaggatgggcccccccagagccctccaaacatctactacaaggtatgagggctcctctnacgtggctatcctgaatccagcccttcttggggtgctcctccagtttaaattcctggtttragggacamctstaacatct

SEQ ID NO: 384 - DNA, 2171 bp, Homo sapiens
  misc_feature (2166): n equals a,t,g, or c
  misc_feature (2170): n equals a,t,g, or c
agaacaagagctggacacattaaaaagaaagagtccatcagatttgtggaaagaagacttggctacatttattgaagaattggaggctgttgaagccaaggaaaaacaagatgaacaagtcggacttcctgggaaagtggggaaggccaaggggaaaaaaacacaaatggctgaagttttgccttctccgcgtggtcaaagagtcattccacgaataaccatagaaatgaaagcagaggcagaaaagaaaaataaaaagaaaattaagaatgaaaatactgaaggaagccctcaagaagatggtgtggaactagaaggcctaaaacaaagattagaaaagaaacagaaaagagaaccaggtacaaagacaaagaaacaaactacattggcatttaagccaatcaaaaaaggaaagaagagaaatccctggtctgattcagaatcagataggagcagtgacgaaagtaattttgatgtccctccacgagaaacagagccacggagagcagcaacaaaaacaaaattcacaatggatttggattcagatgaagatttctcagattttgatgaaaaaactgatgatgaagattttgtcccatcagatgctagtccacctaagaccaaaacttccccaaaacttagtaacaaagaactgaaaccacagaaaagtgtcgtgtcagaccttgaagctgatgatgttaagggcagtgtaccactgtcttcaagccctcctgctacacatttcccagatgaaactgaaattacaaacccagttcctaaaaagaatgtgacagtgaagaagacagcagcaaaaagtcagtcttccacctccactaccggtgccaaaaaaagggctgccccaaaaggaactaaaagggatccagctttgaattctggtgtctctcaaaagcctgatcctgccaaaaccaagaatcgccgcaaaaggaagccatccacttctgatgattctgactctaattttgagaaaattgtttcgaaagcagtcacaagcaagaaatccaagggggagagtgatgacttccatatggactttgactcagctgtggctcctcgggcaaaatctgtacgggcaaagaaacctataaagtacctggaagagtcagatgaagatgatctgttttaaaatgtgaggcgattattttaagtaattatcttaccaagcccaagactggttttaaagttacctgaagctcttaacttcctcccctctgaatttagtttggggaaggtgtttttagtacaagacatcaaagtgaagtaaagcccaagtgttctttagctttttataatactgtctaaatagtgaccatctcatgggcattgttttcttctctgctttgtctgtgttttgagtctgctttcttttgtctttaaaacctgattttwaagttcttctgaactgtagaaatagctatctgatcacttcagcgtaaagcagtgtgtttattaaccatccactaagctaaaactagagcagtttgatttaaaagtgtcactcttcctccttttctactttcagtagatatgagatagagcataattatctgttttatcttagttttatacataatttaccatcagatagaactttatggttctagtacagatactctactacactcagcctcttatgtgccaagtttttctttaagcaatgagaaattgctcatgttcttcatcttctcaaatcatcagaggccgaagaaaaacactttggctgtgtctataacttgacacagtcaatagaatgaagaaaattagagtagttatgtgattatttcagctcttgacctgtcccctctggctgcctctgagtctgaatctcccaaagagagaaaccaatttctaagaggactggattgcagaagactcggggacaacatttgatccaagatcttaaatgttatattgataaccatgctcagcaatgagctattagattcattttgggaaatctccataatttcaatttgtaaactttgttaagacctgtctacattgttatatgtgtgtgacttgagtaatgttatcaacgtttttgtaaatatttactatgtttttctattagctaaattccaacaattttgtactttaataaaatgttctaaacattgcaaaaaaaaaaaaaaaaaccccggggggggncccng

SEQ ID NO: 385 - DNA, 2364 bp, Homo sapiens
  misc_feature (19): n equals a,t,g, or c
ggtttcacccctgttgccnaaggctggtctccgaactccktgacctcargtgattcacccaccgttggcctcataaacctgttttgcagaactcatttattcagcaaatatttattgagtgcctaccagatgccagtcaccgcacaaggcactgggtatatggtatccccaaacaagagacataatcccggtccttaggtagtgctagtgtggtctgtaatatcttactaaggcctttggtatacgacccagagataacacgatgcgtattttagttttgcaaagaaggggtttggtctctgtgccagctctataattgttttgctacgattccactgaaactcttcgatcaagctactttatgtaaatcacttcattgttttaaaggaataaacttgattatattgtttttttatttggcataactgtgattcttttgggacaattactgtacacattaaggtgtatgtcagatattcatattgacccaaatgtgtaatattccagttttctctgcataagtaattaaaatatacttaaaaattaatagttttatctgggtacaaataaacaggtgcctgaactagttcacagacaaggaaacttctatgtaaaaatcactatgatttctgaattgctatgtgaaactacagatctttggaacactgtttaggtagggtgttaagacttacacagtacctcgtttctacacagagaaagaaatggccatacttcaggaactgcagtgcttatgaggggatatttaggcctcttgaatttttgatgtagatgggcatttttttaaggtagtggtaattacctttatgtgaactttgaatggtttaacaaaagatttgtttttgtagagattttaaagggggagaattctagaaataaatgttacctaattattacagccttaaagataaaaatccttgttgaagttttttaaaaaaaagctaaattacatagacttaggcattaacatgtttgtggaagaatatagcagacgtatattgtatcatttgagtgaatgttcccaagtaggcattctaggctctatttaactgagtcacactgcataggaatttagaacctaacttttataggttatcaaaactgttgtcaccattgcacaattttgtcctaatatatacatagaaactttgtggggcatgttaagttacagtttgcacaagttcatctcatttgtattccattgattttttttttcttctaaacattttttcttcaaacagtatataactttttttaggggatttttttttagacagcaaaaactatctgamgatttccatttgtcaaaaagtaatgrtttcttgataattgtgtagtaatgttttttagaacccagcagttaccttaaagctgaatttatatttagtaacttctgtgttaatactggatagcatgaattctgcattgagaacctgaatagctgtcataaaatgaaactttctttctaaagaaagatactcacatgagttcttgaagaatagtcataactagattaagatctgtgttttagtttaatagtttgaagtgcctgtttgggataatgataggtaatttagatgaatttaggggaaaaaagttatctgcagawatgttgagggcccatctctccccccacacccccacagagctaactgggttacagtgttttatccgaaagtttccaattccactgtcttgtgttttcatgttgaaaatacttttgcatttttcctttgagtgccaatttcttactagtactatttcttaatgtaacatgtttacctggaatgtattttaactatttttgtatagtgtaaactgaaacatgcacattttgtacattgtgctttcttttgtgggacatatgcagtgtgatccagttgttttccatcatttggttgcgctgacctaggaatgttggtcatatcaaacattaaaaatgaccactcttttaattgaaattaacttttaaatgtttataggagtatgtgctgtgaagtgatctaaaatttgtaatatttttgtcatgaactgtactactcctaattattgtaatgtaataaaaatagttacagtgactatgagtgtgtatttattccatgaaatttgaactgtttgccccgaaatggatatggaatactttataagccatagacactatagtataccagtgaatcttttatgcagcttgttagaagtatcctttatttctaaaaggtgctgtggatattatgtaaaggcgtgtttgcttaaacttaaaaccatatttagaagtagatgcaaaacaaatctgcctttatgacaaaaaaataggataacattatttatttatttccttttatcaaa

SEQ ID NO: 386 - DNA, 2864 bp, Homo sapiens
gctaatgagaaagtggctctgcagaaagctctgttatattatgaaagcattcatggacggccggtaacaaagaacgaacggcaggtgatgaagccactatacgacaggtaccggctggtcaaacagatcctctcccgagctaacaccatacccatcattggttccccctccagcaagcggagaagccctttgctgcagccaattatcgagggcgaaactgcttccttcttcaaggagataaaggaagaagaggaggggtcagaagacgatagcaatgtgaagccagacttcatggtcactctgaaaaccgatttcagtgcacgatgctttctggaycaattcgaagatgacgctgatggatttatttccccaatggatgataaaataccatcaaaatgcagccaggacacagggctttcaaatmtccatgctgcctcaatacctgaactcctggaacacctccaggaaatgagagaagaaaagaaaaggattcgaaagaaacttcgggattttgaagacaactttttcagacagaatggaagaaatgtccagaaggaagaccgcactcctatggctgaagaatacagtgaatataagcacataaaggcgaaactgaggctcctggaggtgctcatcagcaagagagacactgattccaagtccatgtgaggggcatggccaagcacagggggcyggcagctgcggtgagagtttactgtccccagagaaagtgcagctctggaaggcagccttggggctggccctgcaaagcatgcagcccttctgcctctagaccatttggcatcggctcctgtttccattgcctgccttagaaactggctggaagaagacaatgtgacctgacttaggcattttgtaattggaaagtcaagactgcagtatgtgcacatgcgcacgcgcatgcacgcacacacacacacagtagtggagctttcctaacactagcagagattaatcactacattagacaacactcatctacagagaatatacactgttcttccctggataactgagaaacaagagaccattctctgtctaactgtgataaaaacaagctcaggactttattctatagagcaaacttgctgtggagggccatgctctccttggacccagttaactgcaaacgtgcattggagccctatttgctgccgctgccattctagtgacctttccacagagctgcgccttcctcacgtgtgtgaaaggttttccccttcagccctcaggtagatggaagctgcatctgcccacgatggcagtgcagtcatcatcttcaggatgtttcttcaggacttcctcagctgacaaggaattttggtccctgcctaggaccgggtcatctgcagaggacagagagatggtaagcagctgtatgaatgctgattttaaaaccaggtcatgggagaagagcctggagattctttcctgaacactgactgcacttaccagtctgattttatcgtcaaacaccaagccaggctagcatgctcatggcaatctgtttggggctgttttgttgtggcactagccaaacataaaggggcttaagtcagcctgcatacagaggatcggggagagaaggggcctgtgttctcagcctcctgagtacttaccagagtttaatttttttaaaaaaaatctgcactaaaatccccaaactgacaggtaaatgtagccctcagagctcagcccaaggcagaatctaaatcacactattttcgagatcatgtataaaaagaaaaaaaagaagtcatgctgtgtggccaattataatttttttcaaagactttgtcacaaaactgtctatattagacattttggagggaccaggaaatgtaagacaccaaatcctccatctcttcagtgtgcctgatgtcacctcatgatttgctgttacttttttaactcctgcgccaaggacagtgggttctgtgtccacctttgtgctttgcgaggccgagcccaggcatctgctcgcctgccacggctgaccagagaaggtgcttcaggagctctgccttagacgacgtgttacagtatgaacacacagcagaggcaccctcgtatgttttgaaagttgccttctgaaagggcacagttttaaggaaaagaaaaagaatgtaaaactatactgacccgttttcagttttaaagggtcgtgagaaactggctggtccaatgggatttacagcaacattttccattgctgaagtgaggtagcagctctcttctgtcagctgaatgttaaggatggggaaaaagaatgcctttaagtttgctcttaatcgtatggaagcttgagctatgtgttggaagtgccctggttttaatccatacacaaagacggtacataatcctacaggtttaaatgtacataaaaatatagtttggaattctttgctctactgtttacattgcagattgctataatttcaaggagtgagattataaataaaatgatgcactttaggatgtttcctatttttgaaatctgaacatgaatcattcacatgaccaaaaattgtgtttttttaaaaatacatgtctagtctgtcctttaatagctctcttaaataagctatgatattaatcagatcattaccagttagcttttaaagcacatttgtttaagactatgtttttggaaaaatacgctacagaatttttttttaagctacaaataaatgagatgctactaattgttttggaatctgttgtttctgccaaaggtaaattaactaaagatttattcaggaatccccatttgaatttgtatgattcaataaaagaaaacaccaagtaagttatataaaataaaaaaaaaaaaaaaaactcga

SEQ ID NO: 387 - DNA, 2683 bp, Homo sapiens
  misc_feature (40): n equals a,t,g, or c
  misc_feature (2649): n equals a,t,g, or c
acgccttccccgaggtgtacgacaagatctgcaaggccgncagactgagsctggagcccgcctggagagacagacacgtgtgagtggtcaggcatcttcccttcactcaagcttggctgctttcctagatccacactttcaaagagaaacccctccagaactcccaccctgacagcccaacaccaccttcctcctggcttccagggggcagcccagtggaatggaaagaatgtgggatttggagtcagacaagcctgagtccagttccccgtttagaactcattagctgtgtgactctgggtgagtcccttaacccctctgagcccgggtctcttcattagttgaaagggatagtaatacctacttgcaggtygttgtcatctgagttgagcactggtcacattgaaggtgctgggtaagtggtagctcttgttgcttcccgttcagcgtcacatctgcagtggagcctgaaaaggctccacattaggtcacctgtgcacagccatggctggaatgatgaaggggatacgctggagttgccctgccatcgcctccatcagccagacgaggtcctcacaggagaaggacagctcttccccaccctgggatctcaggagggcagccacggagggggaggccccagatgcgctgtgccaaagccaggtccgaggccaaagttctccctgccatccttggtgccgtcctgccccttcctccttcatgcctgggcctgcaggcaccccagccaccactgagtccactcggagtgccctgtgttcctggagaaggcattccagggttgaatcttgtcccagcctcagcctgggacacctaggtggagagagtggtctccgctctgaattggatccaggggacctgggctcattcttcttggctcaccaaccctgcaggcctcatctttcccaaaacccactttgtcttggtgggagtgggtccgcgctgctctgcagcaggcggctggggagtggacagcatcaggtgggaaagtggagtccaccctcatgtttctgtaggattctcaccgtggggctggaagaaaagagcatcgacttgatttctccaaccactcatccctctttttctttcttccaccactccccaccccagctgtagttaatttcagtgccttacaaatcctaagctcagagaaagttccatttccgttccagagggaagggaacctccctaggtccttccctggcttgttataacgcaaagcttggttgtttatgcaactctatcttaagaactgcccagcctcagctgaaaacccgaatctgagaaggaattgcgtcatgtaagggaagctggaattaagggagctgagccagtcatggttgtggcgtgtgagtcaggagacctaggtttcagcccctctctactgtcagcgagctgtgcaacgtgggcaagtcattgtcctctgagctgcagtttcctcatctgtcacatcgctacagacaagacctccctggaacccttctgattgtcttagacactgtggttgcaaaacccacggaaagcctcatttgtgtggaaagtcagaggaaaaatgatccagtggacacttggggattatctgtcattcaagatccttccttcaaccccaaggycagctcccatctcatttccagaaaggctcatacctggcttgcagggaagcatctgtcttgtcattccaggtgccagaatcctctcagagtcattgaagggtgttcacccatcccacccaaggcttggcacactgccagtgtcttagcagggtcttgtgagggctgggggcatccaggcactcagaaggcaaaggaaccaccctacccatttggcctctggagggggcagaagaaagaaagaaacctcatcctatattttacaaagcatgtgaattctggcattagctctcataggagacccatgtgcttccttgctcagtgcaaaactgatgattctacttgctgtagatgaatggttaacacgagctagttaaacagtgccattgttttgccagtgaagcctccaaccctaagccactgggacggtggccagagatgccagcagcctctgtcgcccttagtcatataaccaaaatccagaccttatccacaacccggggcttggaaaggaaggtattttggaatcacaccctccggttatgttgctccagtaaaatcttgcctggaaagaggcagtcttcttagcatggtgagctgagttcatggcttttttttgtagccagtcctgtccctggccatccatgtgatggttttggatggagttaaacttgatgccagtgggcagtgcatgtggaaagtatcagagtaagsctctcccctccagagccctgagtttcttggctgcatgaaggttttctttagaatcagaattgtagccagtttctttggccagaaggatgaatacttggatattactgaaagggaggggtggagatgggtgtggcagtgtatggtgtgtgatttttattttcttctttggtcatgggggccaaggagaaaggcatgaatcttccctgtcaggctcttacascacaggcactgtgtctactgtctggaagacatgtccccgtggctgtggggccgctgcttctgtttaaataaaagtggcctggaarmnaaaaaaaaaaaaaaaaaaaaaaaaaaaaaaaaaa

SEQ ID NO: 388 - DNA, 1446 bp, Homo sapiens
  misc_feature (35): n equals a,t,g, or c
  misc_feature (37): n equals a,t,g, or c
  misc_feature (57): n equals a,t,g, or c
aagaactaaaacgactcactatagggaaaaactananacgcctgacaggaaaccggnccggaattcccgggtcgacccacgcgtccgaarargaggtggaggargagggtgatgttgatagtgatgaagaagaggaggaagatgaggagagctcctcggagggcttggaggctgaggactgggcccagggagtagtggaggccggtggcagcttcggggcttatggtgcccaggaggaagcccagtgccctactctgcatttcctggaaggtggggaggactctgattcagacagtgaggaagaggacgatgaggaagaggatgatgaagatgaagacgacgatgatgatgaggaggatggtgatgaggtgcctgtacccagctttggggaggccatggcttactttgccatggtcaagaggtacctgacctccttccccattgatgaccgcgtgcagagccacatcctccacttggaacacgatctggttcatgtgaccaggaagaaccacgccaggcaggcgggagttcgaggtcttggacatcaaagctgagtcactggacctagctgtgcccccaacctagattggcagcaccaccccagggcagaggactctctgggcacccgctgtgcatggagccagagtgcagagccccagatcctttagtaatgcttcccctggtcctgcaacaggcccggtcacctcggccgggcccggggctgaggtcagcctcactgcctgcttattgcctctttctcagaatcctctttcctccccatttggccctgggctcaggggaccaggtggggcgggtggggagctgtccggtgctaccacaccgtgccctcagtggactaaccacagcagcagccagggatgggccctggaggttcccggccggagagtgcctctcccctctgccatccacgtcaggtctttggtggggggaccccaaagccattctgggaagggctccagaagaaggtccagcctaggccccctgcaaggctggcagcccccacccccaccccccaggccgccttgagaagcacagtttaactcactgcgggctcctgagcctgcttctgcctgctttccacctccccagtccctttctctggccctgtccatgtgactttggcccttggttttctttccagattggaggtttccaagaggccccccaccgtggaagtaaccaagggcgcttccttgtgggcagctgcaggccccatgcctctcctccctctctggcagggccccatcctgggcagaggggcctggggctgggcccagagtccagccgtccagctgctcctttcccagtttgatttcaataaatctgtccactccccttttgtgggggtgaacgttttaacagccaaaaaaaaaaaaaaaaaaaaaaaaaaaaaaaaaaaaaaaaaaaaaaaaaaaaaaaaaaaaa

SEQ ID NO: 389 - DNA, 723 bp, Homo sapiens
  misc_feature (705): n equals a,t,g, or c
gggcaagacctcatgcctaaaaaataaagagaaagcagagtaaaactggactctgagataygactaaagttctgtgtgatacgtgtgccttatttagctcaagacattcctggagcacctataaaaactgacttgtaatccaggctatgtctctttttagcttcgtaatctttggcaaggccattggattcttcagctgtacaattaggagactcgatcaggtgattgcctttctcagctgtcagttctctaatttcaggcttggtagcttgtaggaactgaaattgcaattaaaacctttataaactcaaactaaatcatgaattacagaaaaagtccattcttccaaaacttgatgttaccacacttacaagtttaaaatatgaagtcgactgtttaaaggattctgcatatattctagtgtgcacattcagaaacatttttcttggaaaaagtacccaacattttttataactgcacatattaatttattgccagaataaattgcattgcatgctaaataaagtcagataattcaaatccatttgcttttatgtagtttttcttctaaatgtcaacattttggaattaaaatgtttatggttttatatgagggtaggaaatcttaactgctttggggggtattgtttataggctttttgttatggggccggtagttttttaatagggggattgcccatttcnaccgtttgggggcccggg

SEQ ID NO: 390 - DNA, 1046 bp, Homo sapiens
cgggtcgacccacgcgtccggtccaccacaggcaccgcagctcatctaccaggaatatgtgaaccagccagatgttcggccccagcccccttcgccccgagagggccctctgcctgctgcccgacctgctggtgccactctggaaagggccaagactctctccccagggaagaatggggtcgtcaaagacgtttttgcctttgggggtgccgtggagaaccccgagtacttgacaccccagggaggagctgcccctcagccccaccctcctcctgccttcagcccagccttcgacaacctctattactgggaccaggacccaccagagcggggggctccacccagcaccttcaaagggacacctacggcagagaacccagagtacctgggtctggacgtgccagtgtgaaccagaaggccaagtccgcagaagccctgatgtgtcctcagggagcagggaaggcctgacttctgctggcatcaagaggtgggagggccctccgaccacttccaggggaacctgccatgccaggaacctgtcctaaggaaccttccttcctgcttgagttcccagatggctggaaggggtccagcctcgttggaagaggaacagcactggggagtctttgtggattctgaggccctgcccaatgagactctagggtccagtggatgccacagcccagcttggccctttccttccagatcctgggtactgaaagccttagggaagctggcctgagaggggaagcggccctaagggagtgtctaagaacaaaagcgacccattcagagactgtccctgaaacctagtactgccccccatgaggaaggaacagcaatggtgtcagtatccaggctttgtacagagtgcttttctgtttagtttttactttttttgttttgtttttttaaagatgaaataaagacccagggggagaatgggtgttgtatggggaggcaagtgtggggggtccttctccacacccactttgtccatttgcaaatatattttggaaaacaaaaaaaaaaaaaaaaaaaaaaaa

SEQ ID NO: 391 - DNA, 699 bp, Homo sapiens
cggatggggcgtaggtgggcggtgygcccacagctacctgggtaaggcccaagatggctgtcttcgccttagtactcgtgtgaagttggcggggacggttcctgtcatcttcttgggcttatttggtgtgctgttgaaggggggagactagagaaatggcagggaacctcttatccggggcaggtaggcgcctgtgggactgggtgcctctggcgtgcagaagcttctctcttggtgtgcctagattgatcggtataaggctcactctcccgccccccaaagtggttgatcgttggaacgagaaaagggccatgttcggagtgtatgacaacatcgggatcctgggaaactttgaaaagcaccccaaagaactgatcagggggcccatatggcttcgaggttggaaagggaatgaattgcaacgttgtatccgaaagaggaaaatggttggaagtagaatgttcgctgatgacctgcacaaccttaataaacgcatccgctatctctacaaacactttaaccgacatgggaagtttcgatagaagagaaagctgagaacttcggaaaaggctcatctgtcaccctggagaagggaaactgtacttttccctgtgaggaaacggctttgtattttctctgtaataaaatggggcttctttggaaaaaaaaaaaaaaaaaaaaaaaaaaaaaaagtcgacc

SEQ ID NO: 392 - DNA, 1545 bp, Homo sapiens
  misc_feature (24): n equals a,t,g, or c
  misc_feature (25): n equals a,t,g, or c
  misc_feature (54): n equals a,t,g, or c
  misc_feature (58): n equals a,t,g, or c
taccggtccggaattcccgggtcnncccacgcgtccgcgcactgccgccgccgnttcngcccggactcggacgcgtggtagccccaggatgggtgagttcaacgagaagaagacaacatgtggcaccgtttgcctcaagtacctgctgtttacctacaattgctgcttctggctggctggcctggctgtcatggcagtgggcatctggacgctggccctcaagagtgactacatcagcctgctggcctcaggcacctacctggccacagcctacatcctggtggtggcgggcactgtcgtcatggtgactggggtcttgggctgctgcgccaccttcaaggagcgtcggaacctgctgcgcctgtacttcatcctgctcctcatcatctttctgctggagatcatcgctggtatcctcgcctacgcctactaccagcagctgaacacggagctcaaggagaacctgaaggacaccatgaccaagcgctaccaccagccgggccatgaggctgtgaccagcgctgtggaccagctgcagcaggagttccactgctgtggcagcaacaactcacaggactggcgagacagtgagtggatccgctcacaggaggccggtggccgtgtggtcccagacagctgctgcaagacggtggtggctctttgtggacagcgagaccatgcctccaacatctacaaggtggagggcggctgcatcaccaagttggagaccttcatccaggagcacctgagggtcattggggctgtggggatcggcattgcctgtgtgcaggtctttggcatgatcttcacgtgctgcctgtacaggagtctcaagctggagcactactgaccctgccttgggccttgctgctgctgcacccaactactgagctgagaccactgagtaccaggggctgggctccctgatgacacccaccctgtgccatcaccataacctctggggaccccaacctcagaggcagcttcaagtgccttttgctgcgcaccaatgcccagcaggggaggtgaggggggctggcggggcgaagtttggggggtgttttgtggggctccccggacatactctctgcctggtggtcagatgcaggttggaaggggccttgctgagtggcgcaaggccgagcgttcccagcagggggagaaacccttcacaccccaggcccttcaggaactggggctttgccttgcagccacatggccccatcccagttggggaagccaggtgagctctgacccttgggcctgggcctctgcccctcccaacccagccgtcgtctccctcgacagcgcccctgctgtcttccccaccgcagtcaccaccacccgaaatgccacgtggtcactgtgcactgccctgttcatgtgcctctgcggggcagggccttcctggttttgtacactgctgtacccagatgcctacaaccatccctgccacatacaggtgctcaataaacacttgtagagcagaaaaaaaaaaaaaaaaaaaaaaaaaaaaaaaaaaaaaaaaaaaaaaaaaaaaaaaaa

SEQ ID NO: 393 - DNA, 749 bp, Homo sapiens
  misc_feature (490): n equals a,t,g, or c
  misc_feature (748): n equals a,t,g, or c
gcttgagcccaggagttctgggctgttagtgcgctatgccgatcgggtgtccgcactaagttyggcatcaatatggtgacctcccgggagcggrggaccaccaggttgcctaaggaggggtgaaccggyccaggtcggaaacggagcagttttccttgagcggagattcaggtttttcaggtgggtctggtgagctggggtctttacaacccctgccttggctctgctgacaaaaactcccgcaaaagggcccctcgtagcaaggtcccgccgccacgagactttcacatcaatctcttccgcatgcagccctggctgaggcagcacctgggggatgtcctgaattttttacccctctagccatggccactgagccctctgctgccctgccagaatctgccgcccctccatcttctacctctgaatggccacccttagaccctgtgatccatcctctctcctagctgagtaaatccgggtctctaggatnccagaggcagcgcacacaagctgggaaatcctcagggctcctaccagcaggactgcctcgctgccccacctcccgctccttggcctgtccccagattccttccctggttgacttgactcatgcttgtttcactttcacatggaatttcccagttatgaaattaataaaaatcaatggtttccacaaaaaaaaaaaaaaaaaaaaaaaaaaaaaaaaaaaaaaaaaaaaaaaaaaaaaaaaaaaaaaaaaaaaaaaaana

SEQ ID NO: 394 - DNA, 611 bp, Homo sapiens
gcgcggcggcggcggggtggctgggccggcggcggcggcggtacgaggcgcgcgctcggggtcccggtcgcgaggaggaggaggatgtggcgcgcggaggggaaatggctgccgaaaacaagccggaagagcgtttcccaaagtgtattctgcggaactagcacctactgtgttctcaacaccgtgccacctatagaagatgatcatgggaacagcaatagtagtcatgtaaaaatctttttaccgaaaaagctgcttgaatgtctgccgaaatgttcaagtttaccaaaagagaggcaccgctggaacactaatgagagatcatgatgcagccgtccttttggatttctttttaataatgtgtgacccttcacctttgatcccctgacctgcattaccttggtaaccatttcattttttaatttaatttcattttttaattttggtgtacaagctgtaacatttcatctttcaaagtgtaacacgctgatttcctcaaatagagatacccctttgagtgataaatttgcaaaatgctgtcttcattttctgtattaaaattcatttcagttttaaaataaagtgtaatctgtgttttcatccttttaaaa

SEQ ID NO: 395 - DNA, 1856 bp, Homo sapiens
  misc_feature (1851): n equals a,t,g, or c
gttggcgcgcggtgcgcggtgcgtagtctggagctatggtggtggtggcagccgcgccgaacccggccgacgggacccctaaagttctgcttctgtcggggcagcccgcctccgccgccggagccccggccggccaggccctgccgctcatggtgccagcccagagaggggccagcccggaggcagcgagcggggggctgccccaggcgcgcaagcgacagcgcctcacgcacctgagccccgaggagaaggcgctgaggaggaaactgaaaaacagagtagcagctcagactgccagagatcgaaagaaggctcgaatgagtgagctggaacagcaagtggtagatttagaagaagagaaccaaaaacttttgctagaaaatcagcttttacgagagaaaactcatggccttgtagttgagaaccaggagttaagacagcgcttggggatggatgccctggttgctgaagaggaggcggaagcaaggggaatgaagtgaggccagtggccgggtctgctgagtccgcagcactcagactacgtgcacctctgcagcaggtgcaggcccagttgtcacccctccagaacatctccccatggattctggcggtattgactcttcagattcagagtctgatatcctgttgggcattctggacaacttggacccagtcatgttcttcaaatgcccttccccagagcctgccagcctggaggagctcccagaggtctacccagaaggacccagttccttaccagcctccctttctctgtcagtggggacgtcatcagccaagctggaagccattaatgaactaattcgttttgaccacatatataccaagcccctagtcttagagataccctctgagacagagagccaagctaatgtggtagtgaaaatcgaggaagcacctctcagcccctcagagaatgatcaccctgaattcattgtctcagtgaaggaagaacctgtagaagatgacctcgttccggagctgggtatctcaaatctgctttcatccagccactgcccaaagccatcttcctgcctactggatgcttacagtgactgtggatacgggggttccctttccccattcagtgacatgtcctctctgcttggtgtaaaccattcttgggaggacacttttgccaatgaactctttccccagctgattagtgtctaaggaatgatccaatactgttgcccttttccttgactattacactgcctggaggatagcagagaagcctgtctgtacttcattcaaaaagccaaaatagagagtatacagtcctagagaattcctctatttgttcagatctcatagatgacccccaggtattgtcttttgacatccagcagtccaaggtattgagacatattactggaagtaagaaatattactataattgagaactacagcttttaagattgtacttttatcttaaaagggtggtagttttccctaaaatacttattatgtaagggtcattagacaaatgtcttgaagtagacatggaatttatgaatggttctttatcatttctcttccccctttttggcatcctggcttgcctccagttttaggtcctttagtttgcttctgtaagcaacgggaacacctgctgagggggctctttccctcatgtatacttcaagtaagatcaagaatcttttgtgaaattatagaaatttactatgtaaatgcttgatggaattttttcctgctagtgtagcttctgaaaggtgctttctccatttatttaaaactacccatgcaattaaaaggtacaatgcaaaaaaaaaaaaaaaaaaaaaaaccggggggsgccccggaaccaanttccc

SEQ ID NO: 396 - DNA, 2651 bp, Homo sapiens
  misc_feature (45): n equals a,t,g, or c
  misc_feature (47): n equals a,t,g, or c
  misc_feature (2642): n equals a,t,g, or c
gtcacgagcgagggggtgcgtgtgaggtcatcgcgcgggcgggcntncggggtctggcggtttgaacgagacgaagacggaaccggagccggttgcgggcagtggacgcggttctgccgagagccgaagatggcagtgaacgtatactcaacgtcagtgaccagtgataacctaagtcgacatgacatgctggcctggatcaatgagtctctgcagttgaatctgacaaagatcgaacagttgtgctcaggggctgcgtattgtcagtttatggacatgctgttccctggctccattgccttgaagaaagtgaaattccaagctaagctagaacacgagtacatccagaacttcaaaatactacaagcaggttttaagagaatgggtgttgacaaaataattcctgtggacaaattagtaaaaggaaagtttcaggacaattttgaattcgttcagtggttcaagaagtttttcgatgcaaactatgatggaaaagactatgaccctgtggctgccagacaaggtcaagaaactgcagtggctccttcccttgttgctccagctctgaataaaccgaagaaacctctcacttctagcagtgcagctccccagaggcccatctcaacacagagaaccgctgcggctcctaaggctggccctggtgtggtgcgaaagaaccctggtgtgggcaacggagacgacgaggcagctgagttgatgcagcaggtcaacgtattgaaacttactgttgaagacttggagaaagagagggatttctacttcggaaagctacggaacattgaattgatttgccaggagaacgagggggaaaacgaccctgtattgcagaggattgtagacattctgtatgccacagatgaaggctttgtgatacctgatgaagggggcccacaggaggagcaagaagagtattaacagcctggaccagcagagcaacatcggaattcttcactccaaatcatgtgcttaactgtaaaatactcccttttgttatccttagaggactcactggtttcttttcataagcaaaaagtacctcttcttaaagtgcactttgcagacgtttcactccttttccaataagtttgagttaggagcttttaccttgtagcagagcagtattaacayctagttggttcacctggaaaacagagaggctgaccgtggggctcaccatgcggatgcgggtcacactgaatgctggagagatgttatgtaatatgctgaggtggcgacctcagtggagaaatgtaaagactgaattgaattttaagctaatgtgaaatcagagaatgttgtaataagtaaatgccttaagagtatttaaaatatgcttccacatttcaaaatataaaatgtaacatgacaagagattttgcgtttgacattgtgtctgggaaggaagggccagaccttggaacctttggaacctgctgtcaacaggtcttacagggctgcttgaaccctcataggcctaggctttggtctaaaaggaacatttaaaaagttgccctgtaaagttatttggtgtcattgaccaattgcatcccagctaaaaagcaagaggcatcgttgcctggataatagaggatgtgtttcagccctgagatgttacagttgaagagcttggttttcattgagcatttctctatttttccagttatccccgaaatttctatgtattatattttttggggaagtgaggtgtgcccagttttttaatctaacaactacttttggggacttgcccacatctctgggatttgaatggggattgtatcccattttactgtcttttaggtttacatttaccacgtttctcttctctgctccccttgcccactggggactcctctttggctccttgaagtttgctgcttagagttggaagtgcagcaggcaggtgatcatgctgcaagttctttctggacctctggcaaagggagtggtcagtgaaggccatcgttaccttgggatctgccaggctggggtgttttcggtatctgctgttcacagctctccactgtaatccgaatactttgccagtgcactaatctctttggagataaaattcattagtgtgttactaaatgttaattttcttttgcggaaaatacagtaccgtgtctgaattaattattaatatttaaaatacttcattccttaactctccctcatttgctttgcccacagcctattcagttcctttgtttggcaggattctgcaaaatgtgtctcacccactactgagattgttcagcccctgatgtatttgtattgatttgtttctggtggtagcttgtcctgaaatgtgtgtagaaagcaagtattttatgataaaaatgttgtgtagtgcatgctctgtgtggaattcagaggaaaacccagattcagtgattaacaatgccaaaaaatgcaagtaactagccattgttcaaatgacagtggtgctatttctcttttgtggccttttagacttttgttgccctaaaattccattttattgggaacccattttccacctggtctttcttgacagggtttttttctactttaaacagtttctaaataaaattctgtatttcaagagtaaaaaaaaaaaaaaaggggggccscccaangggacccaa

SEQ ID NO: 397 - DNA, 2507 bp, Homo sapiens
  misc_feature (2489): n equals a,t,g, or c
  misc_feature (2496): n equals a,t,g, or c
  misc_feature (2504): n equals a,t,g, or c
  misc_feature (2505): n equals a,t,g, or c
ggctgcccgactggctgtggaaatgaaaactgatctcttgattgttctttcagatgtagaaggcctttttgacagccccccaggttcagatgatgcaaagcttattgatatattttatcccggagatcagcagtctgtgacatttggaaccaagtctagagtkggaatgggtggcatggaagccaaggtgaaagcagccctctgggctttgcaaggtggcacttctgtwgtwattgccaatggaacccacccaaaggtgtctgggcacgtcatcacagacattgtggaggggaagaaagttggtaccttcttttcagaagtaaagcctgcaggccctactgttgagcagcagggagaaatggcgcgatctggaggaaggatgttggccaccttggaacctgagcagagagcagaaattatccatcatctggctgatctgttgacggaccagcgtgatgagatcctgttagccaacaaaaaagacttggaggaggcagaggggagacttgcagctcctctgctgaaacgtttaagcctctccacatccaaattgaacagcctggccatcggtctgcgacagatcgcagcctcctcccaggacagcgtgggacgtgttttgcgccgcacccgaatcgccaaaaacttggaactggaacaagtgactgtcccaattggagttctgctggtgatctttgaatctcgtcctgactgtctaccccaggtggcagctttggctatcgcaagtggcaatggcttgttactcaaaggagggaaggaggctgcacacagcaaccggattctccacctcctgacccaggaggctctctcaatccatggagtcaaggaggccgtgcaactggtgaataccagagaagaagttgaagatctttgccgcctagacaaaatgatagatctgatcattccacgtggctcttcccagctggtcagagacatccagaaagctgctaaggggattccagtgatggggcacagcgaagggatctgtgcacatgtatgtggattccgaggccagtgttgataaggtcaccaggctagtcagagactctaaatgtgaatatccagctgcctgtaatgctttggagactttgttaatccaccgggatctgctcaggacaccattatttgaccagatcattgatatgctgagagtggaacaggtaaaaattcatgcaggccccaaatttgcctcctatctgaccttcagcccctccgaagtgaagtcactccgaactgagtatggggacctggaattatgcattgaagtagtggacaacgttcaggatgccattgaccacatccacaagtatggcagctcccacacggatgtcatcgtcacagaggacgaaaacacagcggagttcttcctgcagcacgtagacagtgcctgtgtgttctggaatgccagcactcgcttttctgatggttaccgctttggactgggagctgaagtgggaatcagtacatcgagaatccacgcccggggaccagtaggacttgagggactgcttactactaagtggctgctgcgagggaaggaccacgtggtctcagatttctcagagcatggaagtttaaaatatcttcatgagaacctccctattcctcagagaaacaccaactgaaaagagccaggaaaacccgggaattttccaaaaggtcttcacgttaaacttgtcttatctcaggagagagcccgctcttgtctcccagttcctggtagggtctgcctgttggaaagtgtacctggatgcttctgggctccgtttggcaatagcartcttggctgatgtgcacagtctggctcccagctcaccctttttttttaaagtaagaaaatagttgctaccgatagggactttgccaagtccaattatcttctaggattgaaaggtgcattttccccataaaaaaggcgaggaaaacccatggctgctttgtgtcacctcagtgacttacagtcccccttggcatttagttggtactagagccagtcatccttaacaaatcttttcacattttatttctttcacatgtagtcatcttcaaaaaggaaagatttggaattttagaaaaggggcaactcttctttttagcattctcatcagaaagtcacaaaaatcgatggaatcatttccactgggaagattgaccttttgtatttatttgtggggtaaattaataagcattccagatgcttgcagcttcctgcatccaggagatgctgtgttccccgtgatgcagctggaacccaagctgcagcaggagatgcaagtttcaggatgttccccactgagctggaggaatatctacagcagtgatgcttgaaatttttgtatgaattattttgtcgtcctacccttttcctccaaaacaaaaattagaggattattttaatactttggattcttcccccttttttgagaaataaagttttttatgaaaagccaaaaaaaaaaaaaaaaaagggngggcggnctagaggnncc

SEQ ID NO: 398 - DNA, 1273 bp, Homo sapiens
  misc_feature (1227): n equals a,t,g, or c
  misc_feature (1229): n equals a,t,g, or c
  misc_feature (1252): n equals a,t,g, or c
ggcacgagtggagtagctgggattacagatttccagaagctgttctgtcaataacaaagtctcaragaaaaccacaaaaccaccaacactaagatcattcttgagtccaatttgaaaaactagggtcaagttctgcagaggcattgaaaggacaagaaaccaccctgatacccatcgtgtgagggaaaatgctctattcaccattcctcagcttctgcttctggtttcagagttctctctatattggagggtgttttaaagctagagtggtctttatccacttttattaacacatctgaatgtgaaggtcaagagaggaaagtgatatgtcctaagtcagagtagagtcaacaagaaaataagacaaacagcgactgagcccctggtgtatactgggcattggccagctactggggatatggagatgaagaaaacataacccttcttcaaggagcccaacctaccaaggtagacagacatatagacaaatagatacttgcatagaaaaaaagaggaaaaggggatcagtgtgacctgtgtaactaagtaccctataaaccctcctgcaacagatcatattgccctttatagtggggatggtaatcccatctgaattccacaggtactttgcagtcataccacacccatgtgtctgtcggtcctgactgtaccatttataaacagcttcactttcagcagttctcagccctcttaagctagggtcattgtcagtagggatactgcttcataagcaccagcagaacaccaaaggagaccatatgggtgaaagcaaccagcactgccctggcgcttcataggttcttagagtttttatcttttactttcagtctaacacagcactgcctgctttttgtttttgttgcttggtttgtttttttcttaccgtgttcaccaaacttgtgtccaaatagctttgggctgatgcaaaaatatctatgtggaagagaagagttgttctcatggagggccttcagatgagtgctatagactctctaggcaactccaagaggcttctcaagcagggtgggcagtgagagctgctatggaatcaatggacaaactgacagggactgctttgaaagacagtactcagttgagtatatatattctctcttaagggctaaaagtttataatcatcccttaaacactctgtgatgggatcttcaggatcatcttttgaagtaaactatattttacaatgtgananaaaaaaaaaaaaaaaaaaaattnctgcggtccgcaagggaattc

SEQ ID NO: 399 - DNA, 3774 bp, Homo sapiens
gacgcaaagagtcgcggcgccatttgctgccgccgagcgtggacgcaggcggatctctgaagagctgggtcgccagcctctcccgcgcacgttgcctggcctccagcacctacttggtcccgcgcgctccctcgtgtcgcccctcggagcagcagccgccgcggtcgccgctacccggaaagaagtcagagacgccgcgaggtcgccgccaccgccatgcccaagaataaaggtaaaggaggtaaaaacagacgcaggggtaagaatgagaatgaatctgaaaaaagagaactggtattcaaagaggatggtcaggagtatgctcaggtaatcaaaatgttgggaaatggacggctagaagcaatgtgtttcgatggtgtaaagaggttatgtcacatcagaggaaaattgagaaaaaaggtttggataaatacctcggacattattttggttggtctccgagactaccaggataacaaagctgatgtaattttaaaatacaatgcagacgaagctagaagtctgaaggcatacggcgagcttccagagcatgctaaaatcaatgaaactgatacatttggtcctggagatgatgatgaaattcagtttgatgacattggagatgatgatgaagatattgatgacatctaaattgaactcaacattttacattccatcttttctgaagattgtcctacaatttggattttgatcatgacaaagaagattaaaatttcattagcatgaatgcaatttgttaaagcagactgatttgtttctaagatatttttggtttttttaaaactgataataatgctgaattatcttaagtgagatgttaagcccactttgttcttttaatgtaatggagcttatgggtagaagaccatgtctactaattacaaaaaaaaaaaaaaaccatgcattgctgcttttcctaccacttccagtaagaaaatgggtgttttgaagaaatcatttgccttgtcctcacggaatctgattaagccctggcctcttgattgtatagagtcattgtgtatattccagttacctagatattcccttgagattttgatacaatttgagggaggcagaagtctgcakttgaagaaaaaaaataagtctgtttgtcatatttaagtagcctgtggctatttttatactgattttgatatcatgttcttttcatagtcgtattttgccaccgtaaacataaaaaaaaaaaaaaagatttccaaaatgccgttttcagaacctgggttttaatagcagtattgaatttgtaagcttagtagttgcagaaattgaacactaggtggcactcagttatcttaacaggggaagtactgatacaattgttgacttttcttttactatgtgtaagaaataccccaaacatgaaaagattgttttgatcatatgcatgtatgtagaatatttttgcagagcagaaagattatgttagaagtgtgatttttattttcagaagtcatatacatgtaagctacaattttgagtgctttataaacacttaagatatatatataaattttaatttcatagcaacttgtaaaaaataaaatacttgttgaaaagcctttttcaacatatccctaagctaagggaagaggaaggaataacaactcagtgaaaagatggtctccagtttctgaatgaaaaagctacagctgagaaataaaataaaatgtcatgctgcagaatatgttatacccttattttgtgttaaggatatattttattatgtgaatggttttgtttttgttttttgtttttgttttttgcttgtattgggaattagctttactggtaacttccttatttagtttttagtggtcaactctaataaaatgaaactagggctgagctagttagccctcactagccaaactgaaactctatgcaacattaaaagaagagatccatcatgtagcttgtgacacttttattttattagtcaccggggaacttttcagtgatgaaaatacacagggtaataaaccttcacatggcttcaaaaggaaaacaagcaaatcttctctaatctactcttactataatttcctaagtgtacaccaaactctggatttaaaaatctgaagtactatagaacattaagttgaagaatggaaattaagagtacgtattcatggtttatatttcttattctatggagttcgtgaacacatctaggtggaatgcatctgagactaagggctggtttttaatcctcataagaaaccagccttgaagaattaacaattctcttcattggtattctaaacctcctaagatatttaggcttctgtacataaaagtgtttttgctaaatttacagtatatatagatcctttcatattattttactaagaatgtttgaactttgcatatttgatatagttcctggtaggaatagcacagctcaaacattagtttttctacttacctcctctaacacgtggtttgtctggagagtttctaaaaattcagctataaccccagttcatgtatttactggtgattgttcttgctgaggtagtaacagcccaatcttgggctgttaaatcctaggaaatctcgaatcatagtgattaaaatagttggggtaaagttgtagcttatatgcaatactacttggaggaattcttctactaatttgtatttaatgtggaaattgtatagtttcattgatttaatcataaataatggaaatggtctccaagaagttttatttttcatttttttgcttatacactctgattcctataatacagtgctataagctatgcacagaaaataaaatgtttgaaatccaagaataatggttcttactgctaagagggagtaatagttattactaatgattttgattgggttgcatttttgttgcaatgtttattccacttgcagttagaatatgaatatgttttatcactagtgtggctaaataaccaaacatttgtgtaaaaaaaaaaaaaagccaagatttcattgtttgttgaatatttcttaagcatctggcccctaaagagaccgcttcttaccaagcctgtaaactatgcatgatggaaattcttgtattttatttaggaatggctgttggtttactcaccacatctgtggaatcatggctataaatgtttgcttacaaactctttgtgacttgtaatttaacttaatctcatctaatgtaaatattagattatgatgttcagtaacatcttccataggtataaactgctgtcattattgatttcagagtaactctgagtaatcaaataggtaaaagcatgttttgagtaaaatagctagatttatactttacttgtatacagacttaacaacaaccggtattgactggattgacagctaaagtatcagaatgaaagcaaggtttttttgatgttacctgactgtcataaagatgaaratgatttgtatkggtatgamatgcttatctttatctacktcgtaagggtarggtaattaacgctgtgactccacgaacttgccactgcatggtgtttggttccctacatcaccctttacttcgctttctctatctgaaagcgaaggaacgcagcctccgtaatgcagcaattggaggatggggtcgccttacccagctccagggggtgggacattggcgagatgtgggtcccgttgccgccggcaggactgttctgcactagggacacccatgggatttaatggccacagaaagctccttggagaacggaccgggcccgtttt

SEQ ID NO: 400 - DNA, 1522 bp, Homo sapiens
  misc_feature (479): n equals a,t,g, or c
  misc_feature (1471): n equals a,t,g, or c
  misc_feature (1481): n equals a,t,g, or c
  misc_feature (1487): n equals a,t,g, or c
  misc_feature (1501): n equals a,t,g, or c
  misc_feature (1508): n equals a,t,g, or c
gcgccgctgtcttttcagtcsgcgctgagtggtttttcggatcatgtctggtggctccgcggattataacagagaacatggcggcccagagggaatggaccccgatggtgtcatcgagagcaactggaatgagattgttgataactttgatgatatgaatttaaaggagtctctccttcgtggcatctatgcttacggttttgagaagccttccgctattcagcagagagctattattccctgtattaaagatccaaaaggtaattctggcacttggagactatatgggagccacttgtcatgcctgcattggtggaacaaatgttcgaaatgaaatgcaaaaactgcaggctgaagcaccacatattgttgttggtacacccgggagagtgtttgatatgttaaacagaagatacctttctccaaaatggatcaaaatgtttgttttggatgaagcagatgaaatgttgagccgtggnttttaaggatcmaatctatgagattttccaaaaactaaacacaagtattcaggttgtgttgctttctgccacaatgccaactgatgtgttggaagtgaccaaaaaattcatgagagatccaattcgaattctggtgaaaaaggaagaattgacccttgaaggaatcaaacagttttatattaatgttgagagagaggaatggaagttggatacactttgtgacttgtacgagacactgaccattacacaggctgttatttttctcaatacgaggcgcaaggtggactggctgactgagaagatgcatgccagagacttcacagtttctgctctgcatggtgacatggaccagaaggagagagatgttatcatgagggaattccggtcagggtcaagtcgtgttctgatcactactgacttgttggctcgcgggattgatgtgcaacaagtgtctttggttataaattatgatctacctaccaatcgtgaaaactatattcacagaattggcagagggggtcgatttgggaggaaaggtgtggctataaactttgttactgaagaagacaagaggattcttcgtgacattgagactttctacaatactacagtggaggagatgcccatgaatgtggctgaccttatttaattcctgggatgagagttttggatgcagtgctcgctgttgctgaataggcgatcacaacgtgcattgtgcttctttctttgggaatatttgaatcttgtctcaatgctcataacggatcagaaatacagattttgatagcaaagcgacgttagtcgtgagctcttgtgaggaaagtcattggctttatcctctttagagttagactgttggggtgggtataaaagatggggtctgtaaaatctttytttcttagaaatttatttcctagttctgtagaaatggttgtattagatgttctctatcatttaataatatacttgtggactaaaagatataagtgctntataaaatcnggcccnattatgtttaaatntcagatnacccttaatcaaat

SEQ ID NO: 401 - DNA, 1370 bp, Homo sapiens
  misc_feature (1223): n equals a,t,g, or c
agcccttcctgccccagctgcagaccactttcaccaaagccctgcaggactccaaccggggggtgcgcctgaaggcgcagatgctctggggaagctcatttccatccacattaaggtggaccccctcttcacagagctgctcaatggcatccgcgccatggaggacccaggtgtcagggacacattgctgcaggccctgaggtttgtgattcagggagcaggggccaaagtggatgccgtcatccggaaaaacatcgtctcactcctgctgagcatgctgggacacgatgaggacaacactcgcatctcctcagccgggtgcctaggggaactgtgtgcctttttgactgaagaggagcttagtgccgttctacagcagtgcttgctggcggacgtgtccggcattgactggatggttcggcacgggcggagctggcactttccgtggctgtgaatgtggctcctggcagactttgtgccggcagatatagcagtgatgttcaggaaatgatcctgagcagtgccacggcggacaggatccccattgcggtgagcggggtccggggcatgggctttctcatgagacaccacatcgagacaggcggagggcagttgccggccaaactttccagcctgttcgttaagtgtctgcagaacccatccagcgacatcaggctggtggctgagaagatgatctggtgggcaaataaggacccactgcctcccctggacccccaggccatcaagcccatcctgaaggctcttcttgacaacaccaaggataagaacaccgtggtcagggcctacagcgaccaggcaattgtcaacctcctcaagatgcggcagggtgaagaggtgtttcagtccctctccaagatcctggatgtggccagtttggaggtgctgaacgaggttaaccgaagtccctgaagaagctggccagccaggccgactccacggagcaggtggacgacaccatcctgacatgagaggcctgggccagcagcagcattgccgctccacatctttgctcaatgttttcatttttgaaaatacatttgttccaatggggagcttggaagatggcgttcccagaaagtattttaatatcaatagaccacagccaaagccttaaatcaaacccacacacaactgaaaattgcctcctccatctctcaccttttcctgtggagaagagaaggaaaagcacacgcatgcgcctncagcaaatggcagcccaggagctgtttgtccaktttaggcatggctaggtctgggaactattaataggcagggtcagaytktggggttcctcttctcctgtgcttgagctctggtttgagagctggcgctaccaacctttttcctat

SEQ ID NO: 402 - DNA, 1412 bp, Homo sapiens
  misc_feature (51): n equals a,t,g, or c
  misc_feature (1406): n equals a,t,g, or c
ttatataaagatctatcaaggtgaagaattaccacatcccaaatccatgtnacaggccacagcagaagctaacaatttagcagccgtggcaactgccaaggacacatacaacaaaaaaatggaagagatttgtggtggtgacaaaccatttctggccccaaatgacttgcagaccaaacacctgcaacttaaggaagaatctgtgaagctattccraggggtgaagaagatgggtggggaagaatttagccggcgttacctgcagcagttggagagtgaaatagatgaactttacatccaatatatcaagcacaatgatagcaaaaatatcttccatgcagctcgtaccccagccacactgtttgtagtcatctttatcacatatgtgattgctggtgtgactggattcattggtttggacatcatagctagcctatgcaatatgataatgggactgacccttatcaccctgtgcacttgggcatatatccggtactctggagaataccgagagctgggagctgtaatagaccaggtggctgcagctctgtgggaccaggctttgtacaagctttacagtgcagcagcaacccacagacatctgtatcatcaagctttccctacaccaaagtcggaatctactgaacaatcagaaaagaaaaaaatgtaatgcaaattttaagaaatacaggtgcatgaccaattgtcaattaaatattcagttttatgtctccatgcaaacattcaaagtgcttccatcagaacggagtaaaatactaaacacctctgaagactgcaaactggattagttcttttacttcagtgtttaataagcagatgtatgtatgcatggttatactattttgttaacatgtacaatttcctgatttttcttcaaaaatgctgttataaagtatttgtctatttatgataacagtacacgtgttctgcttgaatttactaaattctactactgggttataattaaatcatgtgatattccacgtttggatatgctcatttaatttctacagaaaaaattttaaattatttcacattagccatttgttaaaacacagcatcataactcagcaggctggatttaatctgtatcatcttatatatatcacaatcttatttttaagcacattttagagttccttagttgctttatcaaaaaccagatattgcttttacatggtttaatagaatataaacctcttgataaaaaatgcacaaaaaatcactttgtatatgtgagtttcactgcattgtatattttttcatttggtacacaaagaatgtattcttcataggtttattcttttaatatgtgaactattattaaagtttactctggttcctaagattaaaaamaaaaaaaaaaaaaaaaaaaaaaaaaaaanaaaaaa

SEQ ID NO: 403 - DNA, 1750 bp, Homo sapiens
  misc_feature (2): n equals a,t,g, or c
  misc_feature (40): n equals a,t,g, or c
  misc_feature (44): n equals a,t,g, or c
  misc_feature (70): n equals a,t,g, or c
  misc_feature (107): n equals a,t,g, or c
tngtgctccaccgcggtggaggaccgctcctagcaactantggntcccccgggcctgtcaggaattcggncagtgggcatggcgactttttctggcccggctgggcnaatcctgtcgcttaatccgcagaagatgtcgagtttcaaaaggaggtggcgcaggttcgcaagcgcataacccagcgaaaaaaacaagaacaacttactcctggagtagtctatgtgcgccacctacctaacctacttgacgaaacccagatcttttcatatttctcccagtttggcactgtgacacggttcaggctgtccagaagtaaaaggactggaaatagcaaaggctatgcatttgtggagtttgagtctgaggatgttgccaaaatagttgctgaaacaatgaacaactacctgtttggtgaaagactcttggagtgtcattttatgccacctgaaaaagtacataaagaactctttaaagactggaatattccatttaagcagccatcatatccatcagtgaaacggtataatcggaatcggacactaacacaaaagctacggatggaggagcgatttaaaaagaaagaaagattactcaggaagaaattagctaaaaaaggaattgactatgattttccttctttgattttacagaaaacggaaagtatttcaaaaactaatcgtcagacgtctacaaaaggccaggttttacgtaagaagaagaaaaaagtttcaggtactcttgacactcctgagaagactgtggatagccagggccccacaccagtttgtacaccaacatttttggagaggcgaaaatctcaagtggctgaactgaatgatgatgataaagatgatgaaatagttttcaaacagcccatatcctgtgtaaaagaagaaatacaagagactcaaacacctacacattcacggaaaaaaagacgaagaagcagcaatcagtgattttcaatgtattatatttcttttgaaaaatataatatttttatgagagtggactttgtatttcactaggtacaatggaatacaacctttgacaagattttcagaggaaaaatacactgtttggtcaagttaaggaaagcagtgtgtaattttggattgcctgcccttggctgaaatacaggggtgcataccagcttgcagtggcttggctgacattgcctctttgtcctggcctctagttttcttttgatatttcatagctctccttagtttactctgcctggatagaaagttgaccactaactgcaggtttaagtactaaaytgcagccttttctgtcgccagcaattaaagaccaccaatcttgtttgtccatctacatggtttgtcggggacatttaactcatggaggtgctttagatttcaacatcagatggttgaagctggaagtttaattatatgtagagtgagaaggcagttccagttttagcacagatttgtttatgtgttcagattttaatagagattcaaaaatgactcatttttaccaataatgttaaattagttttggttgtgctagcatgaattaataaccaccattttataccagtatcatcagtgaagaattgtatttcaagattcaaacaataaccagcaattaaacttttttctacaatgtatttgtttgcgagtaggacttgggagtcattgggaaaaaaaaataataaattttccccttcattaacgaattcagactcattaaaaacattgccatcagaaaaaaaataaaa

SEQ ID NO: 404 - DNA, 1339 bp, Homo sapiens
  misc_feature (150): n equals a,t,g, or c
  misc_feature (1330): n equals a,t,g, or c
atttcagggaaatgaagatggaatttgaaggtcacttttaaaattaagtcattgatgctgctgttacagagtgtgacagaggatccatgtctgtgacacaggacggtgggaagcctgagagagagtgaaattatgtgatacactgaaatnacttttgtttttcttctaactcatacaaaactggtttggaaagtctttgctttggaagcgtcagacattagaacaggccaaactggactgtctgttcatagcgtgcctgaataagaaggcctcttagggagccagagggagcagagtggtcgtgtcctgcgtgctcttcaccctctggggcgcccctgctgcggctggcaggtgcagacagcctttgctggtccccagcacgtccagggtgggtgctcccttgcccgacagaaccatccccactgtgaggctgtgagagatttgtggcaggaactgtttatgaggctctagttgttgctgttgtggcgggaaagttaagaaacatagcccttaaggaaaccacctttatgtattttcttaaagcacgcctttaaataagcaaaaactttaaaaggcaggaaagagaattcttaggcaaattcagagaaataagtgctagttaatactaatcacctcctcctctgtctctcatcctcctttctcccatcaaagcaaaatatggcctcaccaccagccccaaatcagtgctcagaccctctctgtgtctgtgtgccctcctgggagtcagtcagcgctcaggccaggactgtgcagggccagccagcccatgcgctagtcaggagcacaggcaaggggtgcttgtggcagtggccgggcacctgagccccagctcgttgttaaacgtgctgacggcaaggggcaatggagtgagtttcccaactaagaaaccactattatatatttttycccttcagtcacatagacttcagacaactctcctattttttatggatttttcagctcatttcagatgaaggaactaagtcattgtgaactgtctcttgagatctaaaaacaagatgacttttcctggcacatattccaaagcaaagactttgttgcctgctgcttattgtctaatttacagggatatttaattttgtcaggtctatgtatatttatccagctatacttacttgcacagtggattggagagaaaggattctccagtgtgcacactcatcggtactctttctgcatttccctcgtgctgtgtcccgctcgggttccaatggacagtatcagggcttgtttgacttaggtctttcagttttcctttcggttcccttttaaaaatgtgattgttaanctgcctctt

SEQ ID NO: 405 - DNA, 482 bp, Homo sapiens
  misc_feature (440): n equals a,t,g, or c
  misc_feature (469): n equals a,t,g, or c
cttgggtatcggctattgcctgagtgtgctagagtcctcgaagagtaactgctgaccttattcactggctgtgggccttatggcacagtcagtcaccaggttagagacatgcttcacattcacctacccacaaactagtggatgataaattttggctattcagaagacgtttattataggagtatgtagattttccatagagtgctgttatgtgacttgaattttagtctcggccctgcctctgacattgtcggtggtttatcctggttccaggaaataagactagccttttcctcatgatagtctttggtggtttttaaaacagttgtttaagtcaacagatgtatcatatgcctgacactgctctacaccagtgaataatttacactctaatagggggtggtaactataaagatgataaacatagcatcttaattggngtgtgtatgaaggtggttgttacctcttnctagccacccagg

SEQ ID NO: 406 - DNA, 1413 bp, Homo sapiens
  misc_feature (9): n equals a,t,g, or c
  misc_feature (24): n equals a,t,g, or c
ctggtgctncaccgcggtgtcggnccgctctagcaactagtggatcccccgggcctgcagggaattcggcacgaggtttggtggggttacacgcgggttcaacatgcgtatcgaaaagtgttatttctgttcggggcccatctatcctggacacggcatgatgttcgtccgcaacgattgcaaggtgttcagattttgcaaatctaaatgtcataaaaactttaaaaagaagcgcaatcctcgcaaagttaggtggaccaaagcattccggaaagcagctggtaaagagcttacagtggataattcatttgaatttgaaaaacgtagaaatgaacctatcaaataccagcgagagctatggaataaaactattgatgcgatgaagagagttgaagaaatcaaacagaagcgccaagctaaatttataatgaacagattgaagaaaaataaagagctacagaaagttcaggatatcaaagaagtcaagcaaaacatccatcttatccgagcccctcttgcaggcaaagggaaacagttggaagagaaaatggtacagcagttacaagaggatgtggacatggaagatgctccttaaaaatctctgtaaccatttcttttatgtacatttgaaaatgccctttggatacttggaactgctaaattattttattttttacataaggtcacttaaatgaaaagcgattaaaagacatctttcctgcattgccatctacataatatcagatattacggatgttagattgcatctcagtgttaaatctttactgatagatgtacttaagtaaatcatgaaaattctacttgtaactatagaagtgaattgtggacgtaaaatggttgtgctatttggataatggcactaggcagcatttgtatagtaactaatggcaaaaattcatggctagtgatgtataaaataaaatattctttgcagtaaaatattccctttgttaatgttatagaaggggggatacaaaaaggaactaacaatttgtatggcagtgtcagatatttttattttagtatttcctgttttggtttatttgcatcttagaagagcataatgacattgtttgatgaagcctaattatgctggactgttttgacctggtttaacccttctgataggtagttgtggatgctggggatgagaactgaataatctttgcctggagtgacactacactctagaatttccactttggagaatactcagttccaacttgtgattcctgatagaacagactttacttttctagcccagcattgatctagaagcagaggaatcccagcgccttttaaaagttgttatgtggttttcttttaaaaagctcctgtttttggaaagtagaatttatgggtacctcggccgcgaccacgctaagccgaatt

SEQ ID NO: 407 - DNA, 1693 bp, Homo sapiens
  misc_feature (1548): n equals a,t,g, or c
tgggctgtccggcccactcccctgggagcgcgaagcgktggacccaggcggccatgtcccgccctcgcatgcgcctggtggtcaccgcggacgactttggttactgcccgcgacgcgatgagggtatcgtggaggcctttctggccggggctgtgaccagcgtgtccctgctggtcaacggtgcggccacggagagcgcggcggagctggcccgcaggcacagcatccccacgggcctccacgccaacctgtccgagggccgccccgtgggtccggcccgccgtggcgcctcatcgctgctcggcccggaargcttcttccttggcaagatgggattccgggaggcggtggcggccggagacgtggatttgcctcaggtgcggagccgcagctacaggaggatgctcgcgaggacccccagagctccgcccggaggtactgtgaggccgttagagctggcggtggatgacttccgcattcaaacactggagccatcacacggaagcacgaggagggtatcctcggcagctactcccggtcgctcaaggtgtctctcgctcgccctctaggtgcgggaggagctcgaggcccaactaagctgcttccgggagctgctgggcaggcycccacgcacgcggacgggcaccagcactgcacgtrckcycaggtgcgtggttagtgatcccagtttggagggcgttactcccaggcggggctgggggagtakgggaagttcgatgcccccaggtgaaaggacgtgctcctccctgacccgctccgcccgcaggcgtgtgccaggtgttcgccgaggcgctgcaggcctatggggtgcgctttacgcgactgccgctggagcgcggtgtgggtggctgcacttggctggaggcccccgcgcgtgccttcgcctgcgccgtggagcgcgacgcccgggccgccgtgggccccttctcccgccacggcctgcggtggacagacgccttcgtgggcctgagcacttgcggccggcacatgtccgctcaccgcgtgtccggggccctggcgcgggtcctggaagtaccctagcgggccacaccctgacagccgagctgatggcgcaccccggctaccccagtgtgcctcccaccggcggctgcggtgaaggccccgacgctttctcttgctcttgggagcggctgcatgagctgcgcgtcctcaccgcgcccacgctgcgggcccagcttgcccaggatggcgtgcagctttgcgccctcgacgacctggactccaagaggccaggggaggaggtcccctgtgagcccactctggaacccttcctggaaccctccctactctgaccccctacagacaaccaagcactaatccccttagtaccaagaaaggggagccaggatttagtcctggcccagcccagagctgggacctggagcacgatctgttgacttccctgggtaggacactgccacctctgggctcaggtcctcatgcctccaaatggcatctagagtttgagcagccttcttggctgcaggcaggcctagcctgtggcancgggctagggcccgcagagcatttggtgcccctccatgttgcaatgcaaacaccttcaccactggggcagtggggagagatggctatattaataaaataacgtgtgtctttcaaaaaaaaaaaaaaaaaaactcgagacagttct

SEQ ID NO: 408 - DNA, 1342 bp, Homo sapiens
  misc_feature (107): n equals a,t,g, or c
  misc_feature (1332): n equals a,t,g, or c
caggaaaaatctggagatttacgaggctgtgacgtccccccagggccccgccatgacctggagcatgtttgctgtgggctggatggagctgaaggacgcatgcgggncccggggcctcctggacaggagctttgccaacatggctgaacccttcaaggtgtggacggagaatgcagacgggtcaggcgctgtgaacttcctgacaggcatggggggcttcctgcaggcggtggtcttcgggtgcacggggttcagrgtsagcgtctccggcatcttctaccaggggmacragctcaacttctstttttccgaggactccgtgaccgtggaggtcacagctcgagcagggccctgggctcctcacctggaggctgagctgtggccatcccagtcccggctctccctgttgccaggacacaaggtctcctttccccgctcggctggccggatacaaatgtcacccccgaagctgcctggaagttccagctccgagttccctgggaggactttttcagatgttagggacccgctccagagccccctctgggtcaccctgggttcctccagccccaccgagtcactcactgtggaccctgcctctgaataatcaggaacggtggcttcagagacgtctcttgggccttccctctggccacgtctgcacccacccctcctgggcaccctcctagcctgccatccctcacctgcagccaggctctcagggaaggtccatgctgcttggcctgagttcaaggctttctgcctgtagcctggactcccgtggacccccgtgggcaggtggcttccccgtggcatctccacaccgcctctgcctgcccctgtggactgatgctatcgcgcaccgtcccacgaccccaccccgagctcctgaagccggggtctgagcctgcatcacctctggcctctcatcccccactctcctgagagcagtggtcacagcggccggccgctctgctgagaaggcagagaggcaggctcaggcctcagcgtggacagcagggataaggggcacgaaggacggggactcggccccttcagaattcctcaggactctcaggtgcagctttgccaaaaaggaacttttcatgtcatgcagttgaggggacttagtctcaatcccaggctcctcttgactctgggcagcyttrtcttgggcagctcwgccccagggttcggtcgtcagcagtttcccaagaacaagatgtgatggcatctgctgctgaaaccctgatgaggaccaggccccctgcaccgctgtcagcctgaggaattaaagctttggtgctgggaaaaaaaaaaaaaaaaaaaaanaaaaaaacca

SEQ ID NO: 409 - DNA, 2417 bp, Homo sapiens
  misc_feature (107): n equals a,t,g, or c
  misc_feature (680): n equals a,t,g, or c
aaaaaaaaaaaaaaaaaccaaacacaaagagagcaattttgggccaacagttaccattcaagcctggccctttaggccagcccagtccacgggctctgagtgtggangctgcgtagcaccaggaagcggctctgctgaggttcaaggggccccagcacagtgtggcatccgttcagcttttggttggtccaggatggtggggagccaggcctcggggcctcggagcaaccacccgagcagacggagtacacggagcagcggccccggccccgccaacgctgccgccgggatgctccagaccttgtatgattacttctggtgggaacgtctgtggctgcctgtgaacttgacctgggccgatctagaagaccgagatggacgtgtctacgccaaagcctcagatctctatatcacgctgcccctggccttgctcttcctcatcgttcgatacttctttgagctgtacgtggctacaccactggctgccctcttgaacataaaggagaaaactcggctgcgggcacctcccaacgccaccttgggaacatttctacctgaccagtggcaagcagcccaagcaggtggaagtagarcttttgtcccggcagarcgggcttytctggccgccagtaragcgttggttccgtcgccgccgcaaccaggaccggcccagtctcctncaagaagttccgagaagccagctggagattcacattttacctgattgccttcattgccggcatggccgtcattgtggataaaccctggttctatgacatgaagaaagtttgggagggatatcccatacagagcactatcccttcccagtattggtactacatgattgaactttccttctactggtccctgctcttcagcattgcctctgatgtcaagcgaaaggatttcaaggaacagatcatccaccatgtggccaccatcattctcatcagcttttcctggtttgccaattacatccgagctgggactctaatcatggctctgcatgactcttccgattacctgctggagtcagccaagatgtttaactacgcgggatggaagaacacctgcaacaacatcttcatcgtcttcgccattgtttttatcatcacccgactggtcatcctgcccttctggatcctgcattgcaccctggtgtacccactggagctctatcctgccttctttggctattacttcttcaattccatgatgggagttctacagctgctgcatatcttctgggcctacctcattttgcgcatggcccacaagttcataactggaaagctggtagaagatgaacgcagtgaccgggaagaaacagagagctcagagggggaggaggctgcagctgggggaggagcaaagagccggcccctagccaatggccaccccatcctcaataacaaccatcgtaagaatgactgaaccattattccagctgcctcccagattaatgcataaagccaaggaactacccygctccctgcgctatagggtcactttaagctctggggaaaaaggagaaagtgagaggagagttctctgcatcctccctccttgcttgtcacccagttgcctttaaaccaaattctaaccagcctatccccaggtagggggacgttggttatattctgttagagggggacggtcgtattttcctccctacccgccaagtcatcctttctactgcttttgaggccctccctcagctctctgtgggtaggggttacaattcacattccttattctgagaatttggccccagctgtttgcctttgactccctgacctccagagccagggttgtgccttattgtcccatctgtgggcctcattctgccaaagctggaccaaggctaacctttctaagctccctaacttgggccagaaaccaaagctgagcttttaactttctccctctatgacacaaatgaattgagggtaggaggagggtgcacataacccttaccctacctctgccaaaaagtgggggctgtactggggactgctcggatgatctttcttagtgctacttctttcagctgtccctgtagcgacaggtctaagatctgactgcctcctcctttctctggcctcttcccccttccctcttctcttcagctaggctagctggtttggagtagaatggcaactaattctaatttttatttattaaatatttggggttttggttttaaagccagaattacggctagcacctagcatttcagcagagggaccattttagaccaaaatgtactgttaatgggtttttttttaaaattaaaagattaaataaaaaatattaaataaaacatggcaataagtgtcagactattaggaattgagaagggggatcaactaaataaacgaagagagtctttcttaaaaaaaaaaaaaaaaaaaaaa

SEQ ID NO: 410 - DNA, 1401 bp, Homo sapiens
  misc_feature (1394): n equals a,t,g, or c
ttgtgtatattgttgacatctgataatttgtgcaattttatttttaacttaaaagatgggaaccaacaaatgtgccagccaggcaggtatgacagcttacgggactaggaggcatctttatgatcccaaaatgcaaactgacaaaccttttgaccagaccacaattagtctgcagatgggcactaataaaggagccagccaggcagggatgttagcaccaggtaccagaagagacatctatgatcagaagctaacattacagccggtggacaactcgacaatttccctacagatgggtaccaacaaagttgcttcccagaaaggaatgagtgtgtatgggcttgggcggcaagtatatgatcccaaatactgtgctgctcctacagaacctgtcattcacaacggaagccaaggaacaggaacaaatggttcggaaatcagtgatagtgattatcaggcagaataccctgatgagtatcatggcgagtaccaggatgactaccccagagattaccaatatagcgaccaaggcattgattattagatccacacagaaggagctcagtatttagtcctttgtttttattcagtgagaaccaagctagccttgagtaatttttatcttgtcttcctaaaacactattaagcttattgtacttttaagaaaaattgccttacgtacattcctttttcctttttctgcctcttccctcaatagttgccttttagtgctgtaatagttaaatcctacagcataatcaataactcgcatatgaagtaaaaaggaatactgtgaaaggggagtactcttgtacagccagttcttttatgcaaaaatctatgcatttttacaatcttatattaaactggtattttcaaacaataggaaacttttttttttttttttttacagtttagtgtatctggtttctacatggaagactaaactcatgcttattgctaaatgtggtctttgccaactaaatttaagatgcagcattttagaaatttacatatcaatgtttctacagtattgtttgctaatttttaaataaagtcatgatcagtgtgcatttgtgattatatgtgtactcattctcttacctagcgaacaagatcttttcagagtggtgtttctaaaagagcatgtacaaaagtggcctgtggacatttaggcctgggtgatgcatttgctcttcctgtttgtgccaatgtatcaatgtagagttgctctgttttcttcaactgtatttattgctgcatttctcagcataaacttatcccattgtattttttataaataaatattttttttgaactttmaaaaaaaaaaaaaaaaaaaaaaaaaaaaaaaaaaaaaaaaaaaaaaaaaaaaaaaaaaaaaaaaaaagggnggccgtt

SEQ ID NO: 411 - DNA, 3016 bp, Homo sapiens
  misc_feature (399): n equals a,t,g, or c
cggaccgcttcccccgagccagcagcgtttgacgtcatcgtgcgtgtggtgcccctgctgccggggctggtgattggaggaaaccccgtgtctgcggacggctgtagcctgtgagcagcgagatccagggacagagtctcagcctcgccgctgctgccgccgccgccgcccagagactgctgagcccgtccgtccgccgccaccacccactccggacacagaacatccagtcatggataaaaatgagctggttcagaaggccaaactggccgagcaggctgagcgatatgatgacatggcagcctgcatgaagtctgtaactgagcaaggagctgaattatccaatgaggagaggaatcttctctcagttgcttataaaaatgttgtaggagcccgtangtcatcttggagggtcgtctcaagtattgaacaaaagacggaaggtgctgagaaaaaacagcagatggctcgagaatacagagagaaaattgagacggagctaagagatatctgcaatgatgtactgtctcttttggaaaagttcttgatccccaatgcttcacaagcagagagcaaagtcttctatttgaaaatgaaaggagattactaccgttacttggctgaggttgccgctggtgatgacaagaaagggattgtcgatcagtcacaacaagcataccaagaagcttttgaaatcagcaaaaaggaaatgcaaccaacacatcctatcagactgggtctggcccttaacttctctgtgttctattatgagattctgaactccccagagaaagcctgctctcttgcaaagacagcttttgatgaagccattgctgaacttgatacattaagtgaagagtcatacaaagacagcacgctaataatgcaattactgagagacaacttgacattgtggacatcggatacccaaggagacgaagctgaagcaggagaaggaggggaaaattaaccggccttccaacttttgtctgcctcattctaaaatttacacagtagaccatttgtcatccatgctgtcccacaaatagttttttgtttacgatttatgacaggtttatgttacttctatttgaatttctatatttcccatgtggtttttatgtttaatattaggggagtagagccagttaacatttagggagttatctgttttcatcttgaggtggccaatatggggatgtggaatttttatacaagttataagtgtttggcatagtacttttggtacattgtggcttcaaaagggccagtgtaaaactgcttccatgtctaagcaaagaaaactgcctacatactggtttgtcctggcggggaataaaagggatcattggttccagtcacaggtgtagtaattgtgggtactttaaggtttggagcacttacaaggctgtggtagaatcataccccatggataccacatattaaaccatgtatatctgtggaatactcaatgtgtacacctttgactacagctgcagaagtgttcctttagacaaagttgtgacccattttactctggataagggcagaaacggttcacattccattatttgtaaagttacctgctgttagctttcattatttttgctacactcattttatttgtatttaaatgttttaggcaacctaagaacaaatgtaaaagtaaagatgcaggaaaaatgaattgcttggtattcattacttcatgtatatcaagcacagcagtaaaacaaaaacccatgtatttaacttttttttaggatttttgcttttgtgattttttttttttttttgatacttgcctaacatgcatgtgctgtaaaaatagttaacagggaaataacttgagatgatggctagctttgtttaatgtcttatgaaattttcatgaacaatccaagcataattgttaagaacacgtgtattaaattcatgtaagtggaataaaagttttatgaatggacttttcaactactttctctacagcttttcatgtaaattagtcttggttctgaaacttctctaaaggaaattgtacattttttgaaatttattccttattccctcttggcagctaatgggctcttaccaagtttaaacacaaaatttatcataacaaaaatactactaatataactactgtttccatgtcccatgatcccctctcttcctccccaccctgaaaaaaatgagttcctattttttctggggggggggggggggggggggggggggggggggggggggggggggggggggggggggggggggggggggggggaaaaatatttatttataaaaaatacaatgggataagtttatgctgagaaatgcagcaataaatacagttgaagaaaacagagcaactctacattgatacattggcacaaacaggaagagcaaatgcatcacccaggcctaaatgtccacaggccacttttgtacatgctcttttagaaacaccactctgaaaagatcttgttcgctaggtaagagaatgagtacacatataatcacaaatgcacactgatcatgactttatttaaaaattagcaaacaatactgtagaaacattgatatgtaaatttctaaaatgctgcatcttaaatttagttggcaaagaccacatttagcaataagcatgagtttagtcttccatgtagaaaccagatacactaaactgtaaaaaaaaaaaaaaaaaaagtttcctattgtttgaaaataccagtttaatataagattgtaaaaatgcatagatttttgcataaaagaactggctgtacaagagtactcccctttcacagtattcctttttacttcatatgcgagttattgattatgctgtaggatttaactattacagcactaaaaggcaactattgagggaagaggcagaaaaaggaaaaaggaatgtacgtaaggcaatttttcttaaaagtacaataagcttaatagtgttttaggaagacaagataaaaaaaactcgagactagttctctctcgtgccgaattc

SEQ ID NO: 412 - DNA, 958 bp, Homo sapiens
  misc_feature (930): n equals a,t,g, or c
  misc_feature (934): n equals a,t,g, or c
cttgcgtccccgcgtgtgtgcgcctaatctcaggtggtccacccgagaccccttgagcaccaaccctagtcccccgcgcggccccttattcgctccgacaagatgaaagaaacaatcatgaaccaggaaaaactcgccaaactgcaggcacaagtgcgcattggtgggaaaggaactgctcgcagaaagaagaaggtggttcatagaacagccacagcagatgacaaaaaacttcagttctccttaaagaagttaggggtaaacaatatctctggtattgaagaggtgaatatgtttacaaaccaaggaacagtgatccactttaacaaccctaaagttcaggcatctctggcagcgaacactttcaccattacaggccatgctgagacaaagcagctgacagaaatgctacccagcatcttaaaccagcttggtgcggatagtctgactagtttaaggagactggccgaagctctgcccaaacaatctgtggatggaaaagcaccacttgctactggagaggatgatgatgatgaagttccagatcttgtggagaattttgatgaggcttccaagaatgaggcaaactgaattgagtcaacttctgaagataaaacctgaagaagttactgggagctgctattttatattatgactgctttttaagaaatttttgtttatggatctgataaaatctagatctctaatatttttaagcccaagccccttggacactgcagctcttttcagtttttgcttatacacaattcattctttgcagctaattaagccgaagaagcctgggaatcaagtttgaaacaaagattaataaagttctttgcctagtaaaaaaaaaaaaaaaaaaaaaaaaaaaaaaaaaaaaaaaaaaaaaaaaaaaaaaaaaaaaaaaaaaaaaaaaaaaaaaaaaangggnggccgttttaaaggaaccaggttt

SEQ ID NO: 413 - DNA, 500 bp, Homo sapiens
cgattgaacaggagaagcaagcaggcgaatcgtaatgaggcgtgcgccgccaatatgcactgtacattccacaagcattgccttcttattttacttcttttagctgtttaactttgtaagatgcaaagaggttggatcaagtttaaatgactgtgctgcccctttcacatcaaagaactactgacaacgaaggccgcgcctgcctttcccatctgtctatctatctggctggcagggaaggaaagaacttgcatgttggtgaaggaagaagtggggtggaagaagtggggtgggacgacagtgaaatctagagtaaaaccaagctggcccaaggtgtcctgcaggctgtaatgcagtttaatcagagtgccatttttttttttgttcaaatgattttaattattggaatgcacaatttttttaatatgcaaataaaaagtttaaaaacttaaaaaaaaaaaaaaaaaaaaaaaaaaaaaagcggccgctcgaattaagcc

SEQ ID NO: 414 - DNA, 3397 bp, Homo sapiens
  misc_feature (1): n equals a,t,g, or c
  misc_feature (15): n equals a,t,g, or c
  misc_feature (24): n equals a,t,g, or c
  misc_feature (3081): n equals a,t,g, or c
nggattcgcggccgntccgactgnccgccgggctagcactgacgtgtctctcggcggagctgctgtgcagtggaacgcgctgggccgcgggcagcgtcgcctcacgcggagcagagctgagctgaagcgggacccggagcccgagcagccgccgccatggcaatcaaatttctggaagtcatcaagcccttctgtgtcatcctgccggaaattcagaagccagagaggaagattcagtttaaggagaaagtgctgtggaccgctatcaccctctttatcttcttagtgtgctgccagattcccctgtttgggatcatgtcttcagattcagctgaccctttctattggatgagagtgattctagcctctaacagaggcacattgatggagctagggatctctcctattgtcacgtctggccttataatgcaactcttggctggcgccaagataattgaagttggtgacaccccaaaagaccgagctctcttcaacggagcccaaaagttatttggcatgatcattactatcggccagtctatcgtgtatgtgatgaccgggatgtatggggacccttctgaaatgggtgctggaatttgcctgctaatcaccattcagctctttgttgctggcttaattgtcctacttttggatgaactcctgcaaaaaggatatggccttggctctggtatttctctcttcattgcaactaacatctgtgaaaccatcgtatggaaggcattcagccccactactgtcaacactggccgaggaatggaatttgaaggtgctatcatcgcacttttccatctgctggccacacgcacagacaaggtccgagcccttcgggaggcgttctaccgccagaatcttcccaacctcatgaatctcatcgccaccatctttgtctttgcagtggtcatctatttccagggcttccgagtggacctgccaatcaagtcggcccgctaccgtggccagtacaacacctatcccatcaagctcttctatacgtccaacatccccatcatcctgcagtctgccctggtgtccaacctttatgtcatctcccaaatgctctcagctcgcttcagtggcaacttgctggtcagcctgctgggcacctggtcggacacgtcttctgggggcccagcacgtgcttatccagtkggtggcctttgctattacctgtcccctccatggtccatgaactcaaccggtacatccccacagccgcggcctttggtgggctgtgcatcggggccctctcggtcctggctgacttcctaggcgccattgggtctggaaccgggatcctgctcgcagtcacaatcatctaccagtactttgagatcttcgttaaggagcaaagcgaggttggcagcatgggggccctgctcttctgagcccgtctcccggacaggttgaggaagctgctccagaagcgcctcggaaggggagctctcatcatggcgcgtgctgctgcggcatatggacttttaataatgtttttgaatttcgtattctttcattccactgtgtaaagtgctagacattttccaatttaaaattttgctttttatcctggcactggcaaaaagaactgtgaaagtgaaattttattcagccgactgccagagaagtgggaatggtataggattgtccccaagtgtccatgtaacttttgttttaacctttgcaccttctcagtgctgtatgcggctgcagccgtctcacctgtttccccacaaagggaatttctcactctggttggaagcacaaacactgaaatgtctacgtttcattttggcagtagggtgtgaagctgggagcagatcatgtatttcccggagacgtgggaccttgctggcatgtctccttcacaatcaggcgtgggaatatctggcttaggactgtttctctctaagacaccattgttttcccttattttaaaagtgatttttttaaggacagaacttcttccaaaagagagggatggctttcccagaagacactcctggccatctgtggatttgtctgtgcacctattggctcttctagctgactcttctggttgggcttagagtctgcctgtttctgctagctccgtgtttagtccacttgggtcatcagctctgccaagctgagcctggccaagctaggtggacagacccttgcagtgatgtccgtttgtccagattctgccagtcatcactggacacgtctcctcgcagctgccctagcaaggggagacattgtggtagctatcagacatggacagaaactgacttagtgctcacaagcccctacaccttctgggctgaagatcacccagctgtgttcagaattttcttactgtgcttaggactgcacgcaagtgagcagacaccaccgacttcctttctgcgtcaccagtgtcgtcagcagagagaggacagcacaggctcaaggttggtagtgaagtcaggttcggggtgcatgggctgtggtggtgktgatcagttgctccagtgtttgaaataagaagactcatgtttatgtctggaataagttctgtttgtgctgacaggtggcctaggtcctggagatgagcaccctctctctggcctttagggagtcccctcttaggacaggcactgcccagcagcaagggcagcagagttgggtgctaagatcctgaggagctcgaggtttcgagctggctttagacattggtgggaccaaggatgttttgcaggatgccctgatcctaagaagggggcctgggggtgcgtgcagcctgtcggggagaccycactgctgrcagtgctagccaggaaacagagtgaccaagggacaagaagggacttgcctaaagccacccagcaactcagcagcagaaccaagatgggccccaggctcctccatatggcccagggcttaccaccctatcacacgtggccttgtctagacccagtcctgagcaggggagaggctcttgagacctgatgccctcctacccacatggttctcccactgccctgtctgctctgctgctacagaggggcagggcctcccccagcccacgcttaggaatgcttngcctctggcaggcaggcagctgtacccaagctggtgggcagggggctggaaggcaccaggcctcaggaggagccccatagtcccgcctgcagcctgtaaccatcggctggccctgcaaggcccacactcacgccctgtgggtgatggtcacggtgggtgggtgggggctgaccccagcttccaggggactgtcactgtggacgccaaaatggcataactgagataaggtgaataagtgacaaataaagccagttttttacaaggtaaaaaaaaaaaaaaaaaaaaaaaaaaaaaaaaaaaaaaaaaaaaaaaaaaa

SEQ ID NO: 415 - DNA, 2880 bp, Homo sapiens
  misc_feature (5): n equals a,t,g, or c
tgggnacccttcaagctctcgtgctcattcccccatgatcgccgtaggaagtgatgacagtagccccaacgcaatggccaaggttcagatttttgaatataatgaaaacaccaggaaatatgcaaaagctgaaactcttatgacagtcactgatcctgttcatgatattgcattcgctccaaatttgggaagatctttccatattctagcaatagcgaccaaagatgtgagaatttttacattaaagcctgtgaggaaagaactgacttcctctggtgggccaacaaagtttgaaatccatatagtggctcagttcgataatcataattctcaggtctggcgagtgagttggaatataacaggaacggtgctagcatcttcaggagatgatgggtgtgtaagattgtggaaagctaattatatggacaattggaagtgtactggtattttgaaaggtaatgggagcccagtcaatgggagttctcagcagggaacctcaaatccttccctaggttcaaatattccaagtcttcagaattcattaaatggatcttctgctggcagaaagcacagctgagtacaagctaactggagtaactttgctgttttgctgcttgttgcatgcacacaggaatggaaagcgagctccttttccccttccccagcgccgtttgacctctcccaagatacaccagcagcctgcttactactaaacgcaatccaaaaggcctttaaaaatacagtgtatattttttgtactagtcagtttattgacactatttgaaacttttgaaatataaacggagaggctttctgttgagacattgtcaccaaaacaattttttgaaatgttcctgaaactaatttgggtttaaagattaaaagggttgttaccattcttatctgagtagttgggaggaggggaataccactttagttcatttggaaaatatagacatatttcttttgctttcttaaaacagcttaaaatgatgaacttttataattttaatttgaagattgaataaatattttttataaagattgttttgagtgctgatttgtttactttttgtagatttgctttatccatgatattcagtacaactctgtcatttctttgtaatatttaaaaaatattagtaaaggagtgaattaataaagtagtaatagtaaaatgaaaggaacttgactgtacagtttgtagccaggttaagcatttggtattgtttcatttacaatttgggactaagatggaaacactttttttataagtttttaattcatagtcactaaagagataaatgtttcttatatacatttgtrtatttttatggtgttatttattccatggcttagcttccttcaaatcaaaatttggacacacactattaagagaagccattaaaattttactaaaattgtgcatgtaaattaattgtcagcattccatgtctcaagattttcttaatttagttcgctgtttaaattaattcatgtcctgtaaagttctgaccttgataacaaagctataaatatttaagtttgctaatatgcgtaagtattatcggtaagttacaagatggaagaagaataacagtagggcacagtcattctgtgaatccttttacttatcaaaatttggtagctattctaaggcttttgcagaaaaataagtgttcaatgtttgtagttcttcaaaagcatgttgcagtagccagccatactatgtgtattcccagtatcatgtacgcactaaaaaaaatgtgtgcttgctgctgctgtgagtgaaccattgcttaagataaaaaacttaactagatctgtaaatgtacagaatagcatcagatgtttctgagagattagaaaatgttttgaatttataaaattaatgtttttctttgtaacatttatatatatttyttaacattttaagtttaacagattgtattcctttcaagtttctatacttgcttaagcaatcttgatttgagtaagggtcttgatttgtgctattatgttctgttagttttggcatgaatatactaaagctttttttttttttycwagcatgtgtttyctcctctttggttctctttgtatttactacttttctctttttcttgtgttttttttttcctgtttttgttttgtttggtgttttgttcctgtcttcattgtttcaggtatttctttacccctctggattccccacgggctggatcgagatggtccagttatgcccagctccttcctcctcctcctcctcctctggtagagcactcttgcgatgctgacactgccaacctccagtatcctcaccctcgcagacgatatctctctcggcctcttaatcccttacctgagaatgaagggatttaaaacactgatttaacattgaaaggccttattcaagtgcttgtaaatgctttcatttctggctgctttttgtttttcattttctttcagaagatttttctaacttagggtctgtcttgcatgtattacaaccagaatacagtgtttggaacctaaatctgtttgtgcgtctgcatcaaaggaacatttgcttcactgggtgataacctttgatgaaatgagatatgtccaagtaacgttaactgtgaagttacacacagtagctgacttcaaagtgcctgttctgtaaattttattttaaactgttaccatagtcttaagttgtttatgctttatcagactggctaatgtgaaagcataatattatgaagtttattctgccttatgagaccttaaaaaatggatttcattttacaggctaatgttgtaactgactagtatgtaaaataaatcattcctgtgtataaagcagcaaaacctaaaaaaaaaaaaaaaaaaaat

SEQ ID NO: 416 - DNA, 1616 bp, Homo sapiens
  misc_feature (12): n equals a,t,g, or c
  misc_feature (1610): n equals a,t,g, or c
  misc_feature (1611): n equals a,t,g, or c
  misc_feature (1616): n equals a,t,g, or c
cggacgctggtngattccatgccaaagctttgcaaggctcgcagtgaccaggcgcccgacatgggagtgcatccgccccaacccttttccccctcgtctcctgtgagaattccccgtcggatacgagcagcgtggccgttggctgcctcgcacaggacttccttcccgactccatcactttctcctggaaatacaagaacaactctgacatcagcagcacccggggcttcccatcagtcctgagagggggcaagtacgcagccacctcacaggtgctgctgccttccaaggacgtcatgcagggcacagacgaacacgtggtgtgcaaagtccagcaccccaacggcaacaaagaaaagaacgtgcctcttccagtgattgcygagctgcctcccaaagtgagcgtcttcgtcccaccccgcgacggcttcttcggcaacccccgcaagtccaagctcatctgccaggccacgggtttcagtccccggcagattcaggtgtcctggctgcgcgaggggaagcaggtggggtctggcgtcaccacggaccaggtgcaggctgaggccaaagagtctgggcccacgacctacaaggtgaccagcacactgaccatcaaagagagcgactggctcagccagagcatgttcacctgccgcgtggatcacaggggcctgaccttccagcagaatgcgtcctccatgtgtgtccccgatcaagacacagccatccgggtcttcgccatccccccatcctttgccagcatcttcctcaccaagtccaccaagttgacctgcctggtcacagacctgaccacctatgacagcgtgaccatctcctggacccgccagaatggcgaagctgtgaaaacccacaccaacatctccgagagccaccccaatgccactttcagcgccgtgggtgaggccagcatctgcgaggatgactggaattccggggagaggttcacgtgcaccgtgacccacacagacctgccctcgccactgaagcagaccatctcccggcccaagggggtggccctgcacaggcccgatgtctacttgctgccaccagcccgggagcagctgaacctgcgggagtcggccaccatcacgtgcctggtgacgggcttctctcccgcggacgtcttcgtgcagtggatgcagagggggcagcccttgtccccggagaagtatgtgaccagcgccccaatgcctgagccccaggccccaggccggtacttcgcccacagcatcctgaccgtgtccgaagaggaatggaacacgggggagacctacacctgcgtggtggcccatgaggccctgcccaacagggtcaccgagaggaccgtggacaagtccaccggtaaacccaccctgtacaacgtgtccctggtcatgtccgacacagctggcacctgctactgaccctgctggcctgcccacaggctcggggcggctggccgctctgtgtgtgcatgcaaactaaccgtgtcaacggggtgagatgttgcatcttataaaattagaaataaaaagatccattcaaaaraaaaaaaaaaaaaaaaaaaaaaaaaaaaaaaaaaaaaaaaaaaaaaaaaaaaaaaggggggnnccccn

SEQ ID NO: 417 - DNA, 1815 bp, Homo sapiens
  misc_feature (270): n equals a,t,g, or c
  misc_feature (1184): n equals a,t,g, or c
cagggtcaggagatttctccacgagcaagcactctggcccgaggttgcagatggtgcctttacccacatagtcacagtctggccaccatcggtgcttcagtgggcatgcatgccgcactgggggcagttctcaggggaggctgaggctgggccacgtgaggaagggccttccctggcagccaggatgcccctcgtcactccccttaggagccccaggcccaggccactcaggtgtcagatgtgccagccacctcccggcggcctgaacangtcacgtgggcagctcaggaacaggagctcgagtcccttcgggagcagctggaaggagtgaaccgcagcattgaggaggttgaggccgacatgaagaccctgggcgtcactttgtgcaggcagagtctgagtgccggcacagcaagctcagtacagcagagcgtgagcaggccctgcgcctgaagagccgcgcggtggagctgctgcccgatgggactgccaaccttgccaagctgcagstgtggtggagaatagtgcccagcgggtcatccacttggcgggtcagtgggagaagcaccgggtcccactcctcgctgagtaccgccacctccgaaagctgcaggattgcagagagctggaatcttctcgacggctggcagagatccaagaactgcaccagagtgtccgggcggctgctgaagaggcccgcaggaaggaggaggtctataagcagctgatgtcagagctggagactctgcccagagatgtgtcccggctggcctacacccagcgcatcctggagatcgtgggcaacatccggaagcagaaggaagagatcaccaagatcttgtctgatacgaaggagcttcagaaggaaatcaactccctatctgggaagctggaccggacgtttgcggtgactgatgagcttgtgttcaaggatgccaagaaggacgatgctgttcggaaggcctataagtatctagctgctctgcacgagaactgcagccagctcatccagaccatcgaggacacaggcaccatcatgcgggaggttcgagacctcgaggagcagatcgagacagagctgggcaagaagaccctcagcaacctggagaagatccgggaggactaccgagccctccgccaggagaacgctggcctcctaggccgggtccgggaggcctgagganccgccggcagaggtctctccccagcctcaggcagggatttggggtgctggaggcagtggccaagcacatgccctagctacttcctccgctgtccagttcctcctgctgcggccttggacccagacccctgcccactgaccgcaacccttatatggggtgatagtccagcatgtggggagctcggctgcagtttattggggacggtactgtgggttgggggccttggatcccaaataaatgagtagttcctctgcagtctaagctgaggcatggatcagggctcagggaatgggagtgaggtgagtggcaggggagacacggggtatttttggcaaggcagtgtgtgtggctgtgtgtgtctgcacgggactcaagagacccactggggggctgtgcgtgtgcatatgcgtgagatacacaggtgaattctaacaggccgtgtgtgtgagcgagcacgtgttgggacctcagatcctgagggtactgacgctgcttctgtgtaggcctctgggcacacccctgtgttgacagtgcccctgtgggccctgaggctggctgtgggtgcgtgccttggggtgtgtgggttgtcagggctgtgcttgtgtgtgattgtgtgatgatgcagctttga

SEQ ID NO: 418 - DNA, 1966 bp, Homo sapiens
  misc_feature (15): n equals a,t,g, or c
agaaaaccagtttanggtgacacgtagagaacgcacgccgtgcaggtaccggtccggaattcccagggtcgacccacgcgtccggcttgagtaggccaaatgttgaagttaagttttccaataatgtgacttcttaaaagttttattaaaggggaggggcaaatattggcaattagttggcagtggcctgttacggttgggattggtggggtgggtttaggtaattgtttagtttatgattgcagataaactcatgccagagaacttaaagtcttagaatggaaaaagtaaagaaatatcaacttccaagttggcaagtaactcccaatgatttagtttttttccccccagtttgaattgggaagctgggggaagttaaatatgagccactgggtgtaccagtgcattaatttgggcaaggaaagtgtcataatttgatactgtatctgttttccttcaaagtatagagcttttggggaaggaaagtattgaactgggggttggtctggcctactgggctgacattaactacaattatgggaaatgcaaaagttgtttggatatggtagtgtgtggttctcttttggaatttttttcaggtgatttaataataatttaaaactactatagaaactgcagagcaaaggaagtggcttaatgatcctgaagggatttcttctgatggtagcttttgtattatcaagtaagattctattttcagttgtgtgtaagcaagtttttttttagtgtaggagaaatacttttccattgtttaactgcaaaacaagatgttaaggtatgcttcaaaaattttgtaaattgtttattttaaacttatctgtttgtaaattgtaactgattaagaattgtgatagttcagcttgaatgtctcttagagggtgggcttttgttgatgagggaggggaaactttttttttttctatagacttttttcagataacatcttctgagtcataaccagcctggcagtatgatggcctagatgcagagaaaacagctccttggtgaattgataagtaaaggcagaaaagattatatgtcatacctccattggggaataagcataaccctgagattcttactactgatgagaacattatctgcatatgccaaaaaattttaagcaaatgaaagctaccaatttaaagttacggaatctaccattttaaagttaattgcttgtcaagctataaccacaaaaataatgaattgatgagaaatacaatgaagaggcaatgtccatctcaaaatactgcttttacaaaagcagaataaaagcgaaaagaaatgaaaatgttacactacattaatcctggaataaaagaagccgaaataaatgagagatgagttgggatcaagtggattgaggaggctgtgctgtgtgccaatgtttcgtttgcctcagacaggtatctcttcgttatcagaagagttgcttcatttcatctgggagcagaaaacagcaggcagctgttaacagataagtttaacttgcatctgcagtattgcatgttagggataagtgcttatttttaagagctgtggagttcttaaatatcaaccatggcactttctcctgaccccttccctaggggatttcaggattgagaaatttttccatcgagcctttttaaaattgtaggacttgttcctgtgggcttcagtgatgggatagtacacttcactcagaggcatttgcatctttaaataatttcttaaaagcctctaaagtgatcagtgccttgatgccaactaaggaaatttgtttagcattgaatctctgaaggctctatgaaaggaatagcatgatgtgctgttagaatcagatgttactgctaaaatttacatgttgtgatgtaaattgtgtagaaaaccattaaatcattcaaaataataaactatttttattagagaatgtawaaaaaaaaaaaaaaaaaaactcgta

SEQ ID NO: 419 - DNA, 2852 bp, Homo sapiens
  misc_feature (2838): n equals a,t,g, or c
  misc_feature (2843): n equals a,t,g, or c
tcaagagcggcctgggaatttctacgtttcctcagagagcatcaggaaagggccgcccgtcagaccatggagggacaggccccagtcaagtatatatgacccttttgcgggaatgaaaacgccaggccagcggcagcttatcaccctccaggagcaggtgaagctgggcattgtcaacgtggatgaggctgtgctccacttcaaagagtggcagctcaaccagaagaracgatcggagtcctttcgtttccagcaggaaaatcttaaacggctaagagacagcatcacccgaagacagagagagaagcaaaaatcaggaaagcagacagacttggagatcacggtcccaattcggcactcacagcacctgcctgcaaaagtggagtttggagtctatgagagtggccccaggaaaagtgtcattccccctaggacggagctgagacgaggagactggaaaacagacagcacctccagcacagcaagtagcacaagtaaccgctccagcacccggagcctcctcagtgtgagcagcgggatggaaggggacaacgaggataatgaagtccctgaggttaccagaagtcgcagtccaggccccccacaagtggatgggacacccaccatgtycctcgagagaccccccagggtgcctccgagagctgcctcacagaggmctccgaccagggagaccttccatcctcctccacctgttccacccagaggacgctgattccacctcctaaaacctgcctacttcaggactttaagactcacagtcttcagcctgttaatgatgtcttcatgttgagttttatagcatgactgttgaccttaagatccattctcattgctgataatgctgcagccctgctggtttgggcttgcctcgaagattttattaaggcacgaagaagtgaaaaactaagggcttcattcaccatcaccaagtatatcgaaccatatacttgtttgccaaaaggatgaagacttaatcgaaatacttacctctaatttgccatatcagaagcctaaaaagaatgatcataaatgtacttcaccagtgattttactgaaatgcacttatattagtctttatgtatttgctagttcagcctgatttctagaagaggttatagtgtgagacttgtagtattcaagtaagataagtgacctaattttaaaataattcttctacttttctgtatattcagcagggtatttaagtgctagggctggtcacacacaaccaactgaaaaagactagagggattagtacaaactcctcttatacagaaggcaaatctgaggttccacagaagtctggaaccaagactattcagttggttaaataaagaggttagtctagactgggcctgctcattctaggtcaccacattttccatctccaaatagccaggccctctctccctcaagaaatgcccagatgtagaaattcatcagtgcctattggtcttccagaattttccatcttccgtatctcccaggcatgagactaccaagtttgtttgttttctttccaatttgggaatttatacttcagtatggtttcaacgcagttatgtttccagagaacatctagaagtggctggaaaccagaagctggggattccagggaccccacttagtgctctatttcctttataggttttatttctggtcatagagagagraggacctttgactttttcttcgttgaggcttctgaggaggaaaaacaaacctaaaatagaaatacagtcagcctttcaaatccatgggttctgtgtccgtggattcaaccaaccttggatcaaaaatatttgaaaaaaaatctacaaagtttcaaaaagcaaaacttgaatttgctgcatgccaagaagtatgttgaattcatgtaaatgaagtgatgtgtaggcattgtattagatattataagaaatctagaaatgatttaaagcatacaggaggatgtgcataggttatatgcaaatactatgctattttatatatgggacttgagcatttgtggattttgatactgggggatcctggaaccaatcccccatggataccaaagtacgactgtagttatctattttttacatacttattattaccaccatgctcagtaagtccatttttgcatggaatatggagccttaaaacatgtcatgaatttggagtccctggcacataaatctaccttcaaatcagaggtccttaatgatgcctaaacatacagtaaaattagaatcagaamtacttctttaaaaaatattcaaaatgtgtttgtttcccatgggattattctctatcccacacgaatgtaaaaaaatccacattaatgatccatttaagtatagttttattgggtccttttctaatgattaaaggttctttctcaatttcattcctcagtcctgcaagtaaggactcatactgaagagtactgaaacaaggacttcttgtcagaaacagcttctggaatcttgggttttgtttttgttttttgacaaaatacactattggccatgtccatcacgagagtgtttgtagtaattaattaccttgtacaggacctggcacttagtagcattcttcaaatgttccctcagtgatccttttactctccttgtcacttatttgggagaaataggggcacrtgagataagaagaagaataattttgatgttggtatgcttgccctgttacttatagacagtctttgtcataggcaaacttgaatttgatttaaaatagggctgggaaaaatattcaataactgtaagcccccttttaaatcaaattcaagtttgcccggcacgaggcctcgtnaaaanttcttggcc

SEQ ID NO: 420 - DNA, 2705 bp, Homo sapiens
tgagactgcattcgtatctgagcaggttttctatgcctactgatgtcagtatgtttatactaaccttcatgcttttttcccagaatccctcatctgccagaaaacttgaaaagtttattgcttgtagagttgtactgctttgatttttgaagttggggtagtagttagaactagatttaactagtctataatgaacatgaaggcttttatatatgaagttgtatacctttttgtgtttagagaattatgggaaacctggtaagcaaaactttcctcccagataattgcttccaaattcgaagagttagtcaccaagagagccatatgtatgaaagcgtatctgtgaaaggtaggaaacttaccccccctaagtgtaatgttgctttaggcaactcttgtaaatagtgagacttgtttggtctcttacatgtagagatttgagtgcagttggtacagtactttggtgtctccaccactgtcccttctccccgcttcaaaataagtgtaatccacggtagcagccacacttcctttagaaggaactgttataatttatttaaaagttgaaaaaccacccaagatgactaccaactttcacttttttcttctgccatccaccctcatttttcctttagcaagatttttatatctaactttccttccctccattgagtacgtgctttgagaaaacatttcttaaaacagtgtgtgccacctaaggctggatgggaaagtgcagtcttgttgttcatataaaaacacacttcttattagtttaccacttgcctttttctattgttaatgttctgaatttccttttcttggcttgtttctacttcattttaccctgggtcacttgctgccagcagtttgtgaatggtgtctttcaaataacttagttcttatggcttcacttaaagactgtctcaaaaatactttgctctcttcttcttttttgttcatgggacatggtacctaagcaaataggagttgggtttggtttttctcctaaaataatgctcaatacttacctaatcaaatggcatccatttgaataaaatgacaataactaaagctagttaatgtcagtgacattaaactaactccaggattcaggagttttaatgttagaatttagatttaacagatagagtgtggcttcatttgtccatggtagcccatctctcctaagaccttttctagtctgtcttcctgccttcgaacttgatgacagtaaaaccctgtttagtattctcttgtgcatttggtttgttggttagccgactgtcttgaaactattcattttgcttctagttttattttacagaggtagcattggtgggttttttttttttctctgtctctgtgtttgaagtttcagtttctgttttctaggtaaggcttatttttgattagcagtcaatggcaaagaaaaagtaaatcaaagatgacttcttttcaaaatgtattgtttagcacttaactcagatgaatttataaattattaatcttgatactaaggatttgttacttttttgcatattaggttaatttttaccttacatgtgagagtcttaccactaagccattctgtctctgtactgttgggaagttttggaaacccctgccagtgatctggtgatgatctgatgatttatttaaagagccgttgatgcctccaggaaacttaagtattttattaatatatatataggaatttttttttattttgctttgtctttctctcccttcttttatcctcatgttcattcttcaaaccagtgttttggaagtatgcatgcaggcctataaatgaaaaacacaattctttatgtgtatagcatgtgtattaatgtctaactacatacgcaaaaacttcctttacagaggttcggactaacatttcacatgcacatttcaaaacaagatgtgtcatgaaaacagcccctttacctgccaagacaagcagggctatatttcagtgacagctgatatttgttttgaaagtgaatctcataatatatatatgtattacacattattatgactagaagtatgtaagaaatgatcagaacaaaagaaaatttctattttcatgcaaatatttttcatcagtcatcactctcaaatataaattaaaatataacactcctgaatgcctgaggcacgatctggattttaaatgtgtggtattcattgaaaagaagctctccacccacttggtatttcaagaaaatttaaaacgatcccaaggaaagatgatttgtatgttaaagtgactgcacaagtaaaagtccaatgttgtgtgcatgaaaaggattccttggttatgtgcagggaatcatctcacatgctgtttttcctatttggtttgagaaacaggctgacactattctctttgattagaaaataaactcataaaactcataatgttgatataatcaagatgtaaccactataaatatgtagaagaggaagttttaaaagaccttaagctggcattgtgaaggaacaccatggtagactctttttgtaaatgtattttgtatttaatgaaatgcagtataaaggttggtgaagtgtaatataattgtgtaaacaaatcctgttaatagagagatgtacagaatcgttttgtactgtatcttgaaacttgtgaaataaagattccacctctggttaaaaaaaaaaaaaaaaaaaaaaaa

SEQ ID NO: 421 - DNA, 1901 bp, Homo sapiens
  misc_feature (1828): n equals a,t,g, or c
accggactggcctggggcgggacgtgggcgcgggggcgcggcgtgcggcacgctgcagggctgaagcggcggcggcggtggggactgcacgtagcccggcgctcggcatggctctcctggtgctcggtctggtgagctgtaccttctttctggcagtgaatggtctgtattcctctagtgatgatgtgatcgaattaactccatcraatttcaaccgagaagttattcagagtgatagtttgtggcttgtagaattctatgctccatggtgtggtcactgtcaaagattaacaccagaatggaagaaagcagcaactgcattaaaagatgttgtcaaagttggtgcagttgatgcagataagcatcattccctaggaggtcagtatggtgttcagggatttcctaccattaagatttttggatccaacaaaaacagaccagaagattaccaaggtggcagaactggtgaagccattgtagatgctgcgctgagtgctctgcgccagctcgtgaaggatcgcctcgggggacgaagcggaggatacagttctggaaaacaaggcagaagtgatagttcaagtaagaaggatgtgattgagctgacagacgacagctttgataagaatgttctggacagtgaagatgtttggatggttgagttctatgctccttggtgtggacactgcaaaaacctagagccagagtgggctgccgcagcttcagaagtaaaagagcagacgaaaggaaragtgaaactggcagctgtggatgctacagtcaatcaggttctggcctcccgatacgggattagaggatttcctacaatcaagatatttcagaaaggcgagtctcctgtggattatgacggtgggcggacaagatccgacatcgtgtcccgggcccttgatttgttttctgataacgccccacctcctgagctgcttgagattatcaacgaggacattgccaagaggacgtgtgaggagcaccagctctgtgttgtggctgtgctgccccatatccttgatactggagctgcaggcagaaattcttatctggaagttcttctgaagttggcagacaaatacaaaaagaaaatgtgggggtggctgtggacagaagctggagcccagtctgaacttgagaccgcgttggggattggagggtttgggtaccccgccatggccgccatcaatgcacgcaagatgaaatttgctctgctaaaaggctccttcagtgagcaaggcatcaacgagtttctcagggagctctcttttgggcgtggctccacggcacctgtaggaggcggggctttccctaccatcgttgagagagagccttgggacggcagggatggcgagcttcccgtggaggatgacattgacctcagtgatgtggagcttgatgacttagggaaagatgagttgtgagagccacaacagaggcttcagaccattttcttttcttgggagccagtggatttttccagcagtgaagggacattctctacactcagatgactctaccagtggccttttaaccaagaagtagtacttgattggtcatttgaaaacactgcaacagtgaacttttgcatctcaagaaaacattgaaaaattctatgaattgttgtagccggtgaattgagtcgtattctgtcacataatattttgaagaaaacttggctgtcgaaacatttttctctctgactgctgcttgaatgttcttggaggctgtttcttatgtatgggttttttttaatgtgatcccttcatttgaatattaatggctttttccattaaagaataaaatattttggacaatgccnaaaaaaaaaaaaaaaaaaaaaaaaaaaaaaaacycsagggggggcccggtcccaattcgccctatagtgagtc

SEQ ID NO: 422 - DNA, 2477 bp, Homo sapiens
cacactttgagcgcacttctagtaaacgggtctccaggagtctagatggagctccgattggtgtcatggaccaaagtcttatgarggattttcctggcgctgctggggagatttcagcctatggacctggacttgtcagcattgccgtggtacaagatggggacggcaggagggaagtgagaagcccaactaaagccccacatttgcagctcattgaaggaaagagttcacatgagactctgaatatagtggaggagaagaagcgggcagaggttgggaaagacgaaagagtaatcacagaagaaatgaatggtaaagagatatcacctgggagtggtcctggggagattcgtaaggtggagcctgtgacacaaaaagactccacctccctgtcttctgagagcagcagcagcagcagtgagagtgaggaggaagacgtgggagagtaccgtccccaccaccgagtgaccgagggcaccatcagggaggaacaggagtatgaagaagaggtggaggaagaaccccgcccggcagccaaggtagtagagagggaggaagcagtgcccgaagccagcccagtcacacaagcaggtgccagtgtaatcacagtagaaacagtgatccaggaaaatgtaggtgcccaaaagatacccggagagaagagtgtacacgaaggcgctcttaagcaagacatgggagaagaagcagaggaagagccacagaaagttaacggagaggtgtcccatgttgacattgatgttttgccacaaattatttgttgttcagagccaccagtggtaaaaacagagatggtaacaatttctgatgcctcacaaaggacagaaatctccaccaaggaagtccccattgtccaaactgagaccaaaaccatcacatatgagtctccacagattgatggcggggctggtggtgattcgggcacgttactgaccgcacaaaccatcacatctgagtccgtgtcaacaacgacaaccacacacatcaccaagactgtaaaaggtggaatttctgaaacaagaattgagaaacgcattgtgatcacaggagatggagatattgatcatgaccaggcactggctcaggcgatcagggaagccagagagcagcaccctgacatgtcggtcacaagagtggtggtacacaaagaaacagagttggctgaggaaggggaagattaagtaagaaagtcattttttaaacaacactcaactttgtgaacccctgaagattttttgaccgttccaagtcttaatgccacaccactattccagcgaatttatgctacaactggtaacaatgaccagaagcctgaagaattaaaatgccaacaccaaacctttccttaccagctctggtctatattgctcccatgcatttaatatattattttgttttataaccacttctaaatattctcagttctttctttttgttgttgttaattaaggggttttggttttgttttctgtttactttgtgtgcaactacctgcttttaatgactcactttgatcaaatgacagtgaacaaagccagcccaagctgktaaggtgctgttcacttgaacaggtgctgttgcgcagaaaggaaactctgtgactaatttagatagtggctttccttcttctggattcttttcattgaattctcacagtaaatatttacggagttttcaaattgcagcaaatatactgtatgagaaaatattaatacagattaaaagcctttcttacatcttgaaaattttctaatatttgagaatttcacagggatgttttttatattggacccttttgactttccagtcctgtgactttctacttttagtagagagtcagaatctctggactggagaataatgaagaagttcactgactgtgcactgtgcttagagaccctgccgcaccacagtgccaatgcttgtcagacacatgcccttcggcagcattccagaacaggagggaagagaaagagaaaactttcttcccttctactaaaagattcaggcagcttaaaaccttagtgctttctttcttaacatacccaaatttcaattctttccattatttgaacacttgggtagaactcttgctttgtattaaacctctttgtctacacatgtaaaacttaccttttgttattgagcaggcctatctctttcagatagttttatgattcacacaggtttgaggatgctggggagagggggagggggctgtggtggtgttctgttggttacaagaaagttataccatttaaagctggcaccagagacccgatagggacttattaactatattgaacattttttcctttgcctttgaccctatgtatagttacgatgccagattagatttatagcagcctcaagttgtattaaatgatattttgcttcctgtaatactattataaaataaagtttgtttattctctaaaaaaaaaaaaaaaaaactcgag

SEQ ID NO: 423 - DNA, 777 bp, Homo sapiens
  misc_feature (759): n equals a,t,g, or c
  misc_feature (764): n equals a,t,g, or c
ttcctcgcggaagtggggaggaggcggttgcggttagtggaccgggaccggtaggggtgctgttgccatcatggctgaccccgacccccggtaccctcgctcctcgatcgaggacgacttcaactatggcagcagcgtggcctccgccaccgtgcacatccgaatggcctttctgagaaaagtctacagcattctttctctgcaggttctcttaactacagtgacttcaacagtttttttatactttgagtctgtacggacatttgtacatgagagtcctgccttaattttgctgtttgccctcggatctctgggtttgatttttgcgttgaytttaaacagacataagtatccccttaacctgtacctactttttggatttacgctgttggaagctctgactgtggcagttgttgttactttctatgatgtatatattattctgcaagctttcatactgactactacagtattttttggtttgactgtgtatactctacaatctaagaaggatttcagcaaatttggagcagggctgtttgctcttttgtggatattgtgcctgtcaggattcttgaagttttttttttatagtgagataatggagttggtcttagccgctgcaggagcccttcttttctgggggattcatcatctatgacacacactactgatgcataaactgtcacctgaagagtacgtattagctggcatcaagcctctacttggatatcatcaatctattcctggacctgtacnggttnttgggaacaagtt

SEQ ID NO: 424 - DNA, 1649 bp, Homo sapiens
ggccctttgcgcctgcgcccagctcgccctgcctagccaggagcgccccgccccctgcctgcccggccaccttcgggagccgcttccaataggcgttcgccattggctctggcgacctccgcgcgttgggaggtgtagcgcggctctgaacgcgctgagggccgttgagtgtcgcaggcggcgagggcgcgagtgaggagcagacccaggcatcgcgcgccgagaaggccgggcgtccccacactgaaggtccggaaaggcgacttccgggggctttggcacctggcggaccctcccggagcgtcggcacctgaacgcgaggcgctccattgcgcgtgcgcgttgaggggcttcccgcacctgatcgcgagaccccaacggctggtggcgtcgcctgcgcgtctcggctgagctggccatggcgcagctgtgcgggctgaggcggagccgggcgtttctcgccctgctgggatcgctgctcctctctggggtcctggcggccgaccgagaacgcagcatccacgacttctgcctggtgtcgaaggtggtgggcagatgccgggcctccatgcctaggtggtggtacaatgtcactgacggatcctgccagctgtttgtgtatgggggctgtgacggaaacagcaataattacctgaccaaggaggagtgcctcaagaaatgtgccactgtcacagagaatgccacgggtgacctggccaccagcaggaatgcagcggattcctctgtcccaagtgctcccagaaggcaggattctgaagaccactccagcgatatgttcaactatgaagaatactgcaccgccaacgcagtcactgggccttgccgtgcatccttcccacgctggtactttgacgtggagaggaactcctgcaataacttcatctatggaggctgccggggcaataagaacagctaccgctctgaggaggcctgcatgctccgctgcttccgccagcaggagaatcctcccctgccccttggctcaaaggtggtggttctggcggggctgttcgtgatggtgttgatcctcttcctgggagcctccatggtctacctgatccgggtggcacggaggaaccaggagcgtgccctgcgcaccgtctggagctccggagatgacaaggagcagctggtgaagaacacatatgtcctgtgccgccctgtcgccaagaggactggggaagggaggggagacatgtgtgactttttttaaatagagggattgactcggatttgagtgatcattagggctgaggtctgtttctctgggaggtaggacggctgcttcctggtctggcagggatgggtttgctttggaaatcctctaggaggctcctcctcgcatggcctgcagtctggcagcagccccgagttgtttcctcgctgatcgatttctttccccaggtagagttttctttgcttatgttgaatccattgcctcttttctcatcacagaagtgatgttggaatcgtttcttttgtttgtctgatttatggtttttttaagtataaacaaaagttttttattagcattctgaaagaaggaaagtaaatgtacaagtttaataaaaggggccttcccctttaktaaaaaaaaaaaaaaaaaaaaaaaaaaaaaaaaaaaaaaa

SEQ ID NO: 425 - DNA, 1608 bp, Homo sapiens
  misc_feature (1598): n equals a,t,g, or c
  misc_feature (1600): n equals a,t,g, or c
gcgcgggcggcggrcgrgggcgtcgctgcgcggctggccggtgaggcgcggcatggggcgagtgcagctcttcgagatcagcctgagccacggccgcgtcgtctacagccccggggagccgttggctgggaccgtgcgcgtgcgcctgggggcaccgctgccgttccgagccatccgggtgacctgcataggttcctgcggggtctccaacaaggctaatgacacagcgtgggtagtggaggagggttacttcaacagttccctgtcgctggcagacaaggggagcctgcccgctggagagcacagcttccccttccagttcctgcttcctgccactgcacccacgtcctttgagggtcctttcgggaagatcgtgcaccaggtgagggccgccatccacacgccacggttttccaaggatcacaagtgcagcctcgtgttctatatcttgagccccttgaacctgaacagcatcccagacattgagcaacccaacgtggcctctgccaccaagaagttctcctacaagctggtgaagacgggcagcgtggtcctcacagccagcactgatctccgcggctatgtggtggggcaggcactgcagctgcatgccgacgttgagaaccagtcaggcaaggacaccagccctgtggtggccagtctgctgcagaaagtgtcctataaggccaagcgctggatccacgacgtacggaccattgcggaggtggagggtgcgggcgtcaaggcctggcggcgggcgcagtggcacgagcagatcctggtgcctgccttgccccagtcggccctgccggctgcagcctcatccacatcgactactacttacaggtctctctgaaggcgccggaagctactgtraccctcccggtcttcattggcaatattgctgtgaaccatgccccagtgagcccccggccaggcctggggctgcctcctggggccccacccctggtgtgccttccgcaccaccccaggaggaggctgaggctgaggctgcggctggcggcccccacttcttggaccccgtcttcctctccaccaagagccattcgcagcggcagcccctgctggccaccttgagttctgtgcctggtgcgccggagccctgccctcaggatggcagccctgcctcacacccgctgcaccctcccttgtgcatttcaacaggtgccactgtcccctactttgcagagggctccggggggccagtgcccactaccagcaccttgattcttcctccagagtacagttcttggggctacccctatgaggccccaccgtcttatgagcagagctgcggcggcgtggaacccagcctgacccctgagagctgaccccgtgctgccttctccaggcaggcctggcctctgccctgggactggggcgcccagggcctcgtgccttctctcttggcctagcctggcccactcaggacctgcccagcctctgccagctcctctgcatccgccctcttctccctggggctggggtgggggtggcagggagctgggacctggagagacaactcctgtaaataaaacactttatttgtagaaaaaaaaaaaaaaaaaaaaaaaaantngggggggg

SEQ ID NO: 426 - DNA, 1794 bp, Homo sapiens
  misc_feature (1789): n equals a,t,g, or c
  misc_feature (1790): n equals a,t,g, or c
  misc_feature (1793): n equals a,t,g, or c
gtctctctctctctctctctctctcccttgtgcccgctttctgccatccgcgctgtctcgtgtctccctttttccattaaatgcctcttttcttgcgggtctcatstcgggaatagtgcactacggggacatacctatccccaactatcctaggcccgagaaccagcccttgccttcgcgtaacaggcggagactcgctgaggcgagttgcacttctaattgggcgtgaggtcttgtcaatccccaagttcttccaatcagaagtccggtccatccagccttccgctccccattggcctgtgtggaggaagaggggtgggtaagccgaagtcgctgcgctcagtgcgcaggcgcgaagaagctggcaggggcacgagccgggggcgggtttgaagacgcgtcgttgggttttggaggccgtgaaacagccgtttgagtttggctgcgggtggagaacgtttgtcaggggcccggccaagaaggaggcccgcctgttacgatggtgtccatgagtttcaagcggaaccgcagtgaccggttctacagcacccggtgctgcggctgttgccatgtccgcaccgggacgatcatcctggggacctggtacatggtagtaaacctattgatggcaattttgctgactgtggaagtgactcatccaaactccatgccagctgtcaacattcagtatgaagtcatcggtaattactattcgtctgagagaatggctgataatgcctgtgttctttttgccgtctctgttcttatgtttataatcagttcaatgctggtttatggagcaatttcttatcaagtgggttggctgattccattcttctgttaccgactttttgacttcgtcctcagttgcctggttgctattagttctctcacctatttgccaagaatcaaagaatatctggatcaactacctgattttccctacaaagatgacctcctggccttggactccagctgcctcctgttcattgttcttgtgttctttgccttattcatcatttttaaggcttatctaattaactgtgtttggaactgctataaatacatcaacaaccgaaacgtgccggagattgctgtgtaccctgcctttgaagcacctcctcagtacgttttgccaacctatgaaatggccgtgaaaatgcctgaaaaagaaccaccacctccttacttacctgcctgaagaaattctgcctttgacaataaatcctataccagctttttgtttgtttatgttacagaatgctgcaattcagggctcttcaaacttgtttgatataaaatatgttgtcttttgtttaagcatttattttcaaacactaaggagctttttgacatctgttaaacgtctttttgtttttttgttaagtcttttacattttaatagtttttgaagacaatctaggttaagcaagagcaaagtgccattgtttgcctttaattggggggtgggaagggaaagagggtacttgccacatagtttcctttttaactgcactttctttatataatcgtttgcattttgttacttgctaccctgagtactttcaggaagactgacttaaatattcggggtgagtaagtagttgggtataagatctgaacttttcatctgcagaggcaagaaaaatatttgacattgtgacttgactgtggaagatgatggttgcatgtttctagtttgtatatgtttccatctttgtgataagatgatttaataaatctctttaaatactaaaaaaaaaaaaaaaaaaaaaaaaaaaaaaaaaannaana

SEQ ID NO: 427 - DNA, 770 bp, Homo sapiens
  misc_feature (14): n equals a,t,g, or c
  misc_feature (40): n equals a,t,g, or c
  misc_feature (97): n equals a,t,g, or c
  misc_feature (618): n equals a,t,g, or c
ccaggccctataancccggcaccttggggaggctgaggcnggaagcaccacggagccccaggagttggggacccggctgggccaccatagccagggnccctgtctatttttttaaaaaagtaaaaaatagaaattatctcactacttaaatcccatttttttcacttcatatgaaagaacatattgatagtatattctatattatttcatagatctgtctgaaagagattgggaacaaaaatatctaattgagatattctttaattttttacatagcagctttattttttttattctgtagtatcagcgaaatcagtcatgtttataccttgaatataaatatcaggaatcatgcaattatttctactatgtatttagtagtatcttatatttgtataacattattacattttgcaaattagtatcacaactgctaagtagatgtttctgagtattagaaaaatcagtgttattacctgcaggatattaaaaaacatttgaaaaagagaaaaagaaaaatcagtgtttagaaatgttgatagttattgaatctttgaattgaattttaaaaatccattctagtaatcagagtatactttttttatagaacaaggtggncaggtggggagccctttacccttctggtgaagttaaaccataggaagtttacaatttgcctttcacaaacattagcagtccggggcatggtggctgragcctgtgratycccagcatgttggggaggcccgagttggggagggttgcctgag

SEQ ID NO: 428 - DNA, 512 bp, Homo sapiens
  misc_feature (18): n equals a,t,g, or c
  misc_feature (30): n equals a,t,g, or c
  misc_feature (38): n equals a,t,g, or c
  misc_feature (484): n equals a,t,g, or c
  misc_feature (491): n equals a,t,g, or c
tggatcccccgggactgncagaattccggncacgaggnaagagacttgctttgacaagtacactgggaacacttaccgagtgggtgacacttatgagcgtcctaaagactccatgatctgggactgtacctgcatcggggctgggcgagggagaataagctgtaccatcgcaaaccgctgccatgaagggggtcagtcctacaagattggtgacacctggaggagaccacatgagactggtggttacatgttagagtgtgtgtgtcttggtaatggaaaaggagaatggacctgcaagcccatagctgagaagtgttttgatcatgctgctgggacttcctatgtggtcggagaaacgtgggagaagccctaccaaggctggatgatggtagattgtacttgcctgggagaargcagcggacgcatcacttgcacttctagaaatagatgcaacgwtcaggacacaaggacatctatagaattngagacancttgagcaagaaggataatcg

SEQ ID NO: 429 - DNA, 1470 bp, Homo sapiens
  misc_feature (1346): n equals a,t,g, or c
  misc_feature (1347): n equals a,t,g, or c
  misc_feature (1357): n equals a,t,g, or c
  misc_feature (1387): n equals a,t,g, or c
  misc_feature (1415): n equals a,t,g, or c
  misc_feature (1454): n equals a,t,g, or c
  misc_feature (1462): n equals a,t,g, or c
gtggacacggaagtggtcgtcgtcgcggcaccggtgggagctaggcgcgaggctcggagtgcggccagcgggcggaggcggtctcgcatcggcggcgacggagggctcaggcgtcgtcgtttgggtggggggccgctgaactgacaagcgacatttcagctcctttcacccgccggaaccccggagccggggcccgctcagccggcgttaccatgaccaaggccggtagcaagggcgggaacctccgcgacaagctggacggcaacgaactggacctgagcctcagcgacctgaatgaggtcccggtgaaggagctggctgcccttccaaaggccaccatcctggatctgtcttgtaataaactgactactctaccgtcggatttctgtggcctcacacacctggtgaagctagacctgagtaagaacaagctgcagcagctgccagcagactttggccgtctggtcaacctccagcacctggatctcctcaacaacaagctggtcaccttgcctgtcagctttgctcagctcaagaacctgaagtggttggacctgaaggataaccccctggatcctgtcctggccaaggtggcaggtgactgcttggatgagaagcagtgtaagcagtgtgcaaacaaggtgttacagcacatgaaggccgtgcaggcagatcaggagcgggagaggcagcggcggctggaagtagaacgtgaggcagagaagaagcgtgaggctaagcagcgagctaaggaagctcaggagcgggaactgcggaagcgggagaaggcggaagagaaggagcgccggagaaaggagtatgatgccctcaaagcagccaagcgggagcaggagaagaaacctaagaaggaagcaaatcaggccccgaaatctaagtctggctcccgtccccgcaagccaccaccccggaagcacactcgttcctgggctgtgctgaagctgctgctgctgctgctgctatttggtgtggcgggagggctggttgcttgtcgggtgacagagctgcagcagcagcccctctgcaccagcgtgaacaccatctatgacaatgcggtccagggtctacgccgccatgagatcctccagtgggtcctccagaccgactctcagcagtgagcttgtccccagcacctgctgcctcccagccttggagtttggattcctatggaattgggttctgctggacacaacctctttttagcatcagacctacctgccatcatcaaatggctgcagattggtacatgagaccttctctttgtaggacttcttcattccttagtcagggttccctgaaggaatgaggagaaatgggaggtggccggnngggccgtggnggcaagttacctgcatgcctaaaggagtangcttgggggtgggagagagaaaacatanctttttagtgtatataagttgggaaaggcaaggttggtntactaaanggcagttg

SEQ ID NO: 430 - DNA, 434 bp, Homo sapiens
ggccttgttatggctcctattgcttgtttgctgccagccttctcctcggccccagaggccatgcacccgtgggagctctttgtaaagtactaccatgctaagaacggccgtgcttatgtggaatccccagcccggaagctctcccagtccttcgcccttcctgttacgggaggcactgttgtcacccccaaacagagcctactgacagccatccacatggtgctgacagagcatgacccttttaagcgcagtgcagactcagaattgaaggccttggtgtgcatggcactgaatgagccagcgtctggtgtcctgggtgaacctcatctgcaaktccgggtcactsatcgagcctcactaccagccctggrrctacatggcacacacaggcttttgaaaattgcctcaacctgctcagtcgcctcaacaacctc

SEQ ID NO: 431 - DNA, 1823 bp, Homo sapiens
  misc_feature (1804): n equals a,t,g, or c
  misc_feature (1805): n equals a,t,g, or c
  misc_feature (1815): n equals a,t,g, or c
ggcacgagccccgccccgcccgcgccgcgccggccgctgtcagctccctcagcgtccggccgaggcgcggtgtatgctgagccgctgccgcagcsggctgctccacgtcctgggccttagcttcctgctgcagacccgccggccgattctcctctgctctccacgtctcatgaagccgctggtcgtgttcgtcctcggcggccccggcgccggcaaggggacccagtgcgcccgcatcgtcgagaaatatggctacacacacctttctgcaggagagctgcttcgtgatgaaaggaagaacccagattcacagtatggtgaacttattgaaaagtacattaaagaaggaaagattgtaccagttgagataaccatcagtttattaaagagggaaatggatcagacaatggctgccaatgctcagaagaataaattcttgattgatgggtttccaagaaatcaagacaaccttcaaggatggaacaagaccatggatgggaaggcagatgtatctttcgttctcttttttgactgtaataatgagatttgtattgaacgatgtcttgagaggggaaagagtagtggtaggagtgatgacaacagagagagcttggaaaagagaattcagacctaccttcagtcaacaaagccaattattgacttatatgaagaaatggggaaagtcaagaaaatagatgcttctaaatctgttgatgaagtttttgatgaagttgtgcagatttttgacaaggaaggctaattctaaacctgaaagcatccttgaaatcatgcttgaatattgctttgatagctgctatcatgacccctttttaaggcaattctaatctttcataactacatctcaattagtggctggaaagtacatggtaaaacaaagtaaatttttttatgttcttttttttggtcacaggagtagacagtgaattcaggtttaacttcaccttagttatggtgctcaccaaacgaagggtatcagctatttttttttaaattcaaaaagaatatcccttttatagtttgtgccttctgtgagcaaaactttttagtacgcgtatatatccctctagtaatcacaacattttaggatttagggatacccgcttcctctttttcttgcaagttttaaatttccaaccttaagtgaatttgtggaccaaatttcaaaggaactttttgtgtagtcagttcttgcacaatgtgtttggtaaacaaactcaaaatggattcttaggagcattttagtgtttattaaataactgaccatttgctgtagaaagatgagaaaacttaagctttgttttactacaacttgtacaaagttgtatgacagggcatattctttgcttccaagatttgggttgggggcactaggggttcagagcctggcagaattgtcagctttagtctgacataatctaagggtatggggcaaggatcacatctaatgcttgtgttccttatactctattatatagtgttattcatgattcagctgatcttaacaaaattcgtagcagtggaaccttgaaatgcatgtggctagatttatgctaaaatgattctcagttagcattttagtaacacttcaaaggtttttttttgtttgttttctagacttaataaaagcttaggattaattagaagaagcaatctagttaaatttcccatttgtattttattttcttgaatacttttttcatagttatttgtttaaaaagatttaaaaatcattgcactttggtcagaaaaataataaatatatcttataagggggggcccggannccaattcggnctggagga

SEQ ID NO: 432 - DNA, 3391 bp, Homo sapiens
  misc_feature (1): n equals a,t,g, or c
  misc_feature (33): n equals a,t,g, or c
  misc_feature (68): n equals a,t,g, or c
  misc_feature (99): n equals a,t,g, or c
  misc_feature (114): n equals a,t,g, or c
  misc_feature (3293): n equals a,t,g, or c
  misc_feature (3391): n equals a,t,g, or c
nccccctttgccctcaaatccaaaaatgggaanaattgtggaacccattgccacttgcattgcccttngaccaggattgaaattgatccattcccctcnattcctggtttgggnaaccggggaaaccctaattgaaagacttgtaaagcccacgcccattatttaagtgggaaatcgggtgcctccacccaacacagctggctgccttaggaatgtaagcctcagagaggagtgaagctcgccggaaacttcgggaatgtgatggtttagttgatgccctcattttcattgttcaggctgagattgggcagaaggattcaracagcaagcttgtagagaactgtgtttgccttcttcggaacttatcatatcaagttcaccgggagatcccacaggcagagcgttaccaagaggcagctcccaatgttgccaacaatactgggccacatgctgccagttgctttggggccaagaagggcaaagggaaaaaacctatagaggatccagcaaacgatacagtggatttccctaaaagaacgagtccagctcgaggctatgagctcttatttcagccagaggtggttcggatatacatctcacttcttaaggagagcaagactcctgccatcctagaagcctcagctggagctatccagaacttgtgtgctgggcgctggacgtatggtcgatacatccgctctgctctgcgtcaagagaaggctctttctgccatagctgacctcctgactaatgaacatgaacgggtggtgaaagctgcatctggagcactgagaaacctggctgtggatgctcgcaacaaagaattaattggtaaacatgctattcctaacttggtaaagaatctgccaggaggacagcagaactcctcttggaatttctctgaggacactgtcatctctattttgaacactatcaacgaggttatcgctgagaacttggaggctgccaaaaagcttcgagagacacagggtattgagaagctggtgttgatcaacaaatcagggaaccgctcagaaaaagaagttcgagcagcagcacttgtattacagacaatctggggatataaggaactgcggaagccactggaaaaagaaggatggaagaaatcagactttcaggtgaatctaaacaatgcttcccgaagccagagcagtcattcatatgatgatagtactctccctctcattgaccggaaccaaaaatcagataagaaacctgatcgggaagaaattcagatgagcaatatgggatcaaacacaaaatcactagataacaactattccacaccaaatgagagaggagaccacaatagaacactggatcgatcgggggatctaggcgacatggagccattgaagggaacaacacccttgatgcaggacgaggggcaggaatctctggaggaagagttggatgtgttggttttggatgatgaggggggccaagtgtcttacccctccatgcagaagatttagcaccactatctccgttccatctgggcttatatgtacttttattttttggtggtgaaattgactgatgattttcctttttcttcgctggactattgtgccaactgccaggctgcctcctgcccttacagccctaagtggctgccttctttccatcaactcccaacttcttcctgtgaagtttaattgtctcaacgcctccccctcccccattccctccatttttctcccaagaaacctgactcaattatttgcatattttgagaaactgctgcagattagttctttttgccagttttccctggaactcctggccttttgtggaggggagggatggagagaataggaatcttcactagaagccgtgggaagaattggaagttacatgctgtatatgcaatgtccagcagtctgataaactgacgattcttaatcaagatttttttcctgatggggaagggacttttattttcttttagagaggggaaagtgtgagctcttcccttattcctaatggctatttttgaagcaaagaaggccagcaacattggcacatgccacctggcaaaggacccttgagtaagtgaaggtctcctaaaactgggattaagaaaccttgctctcctcatctccaaggcagggaccatcaagaacctacagactccatctcttctgcaagcctcatgccaaccctgggctattgctgctgccccttaaacacaggctgtccttaacccacctctcctgccctgtgatatgtctgctgagttggcctggccatttccaagaggctgtagaaaggggagaatgtcaaggaagacttttggtagagaaggagcagaaagatgtgtttttgggaagaagaagacctctaggaggagctagtaggaatgtacatgaagcaattagtctgaaactggcttccccactcccccgtttctccttttcctatccttataggcctgtcccttgcctctgccctggattggttggcaaactaaaggacttgatgtacataactcctgtcccttttcccttacaaggtggggattgcccctggctttgcctcttctttgtgcctttggcctggggtgcatctcctcccgcccttccatgtgcctttctttgcctctgcagtctcatttctcataattttgcaaattatattttgttgctttcttacctactattggccctaaatagcagaaagaagagaagtgaccgagagaacctcagattcttcattgaggattggtatagccatgatttcagtcatagcaagcttttgctcaacagcatatgggtgggattttgcaaaaatcctattctgatgaatctcaaagtaaggctggtaagagaagtgagtggtgtgactcttactccttaggtgcccagaatttaccatcatctctgaaggagttacagggaagtggtctccccaattctcccctccctccagtattgccccctctcactttagcatatattaattagcaggttgggctagagaaatcagctgctatgcgggttgattattattattatttctaatccttttccttatttgccttctactccccttaatctaatctaaaagctctgttccatgcaactggagttccttatccctctcttccccttcccttatatattgaggctatggggtaggagaaaagtgcacaacccaccaccccctttactcgtgcattaaaatttcttatttacccttttcccccttcccatttcttcccactttcatctaccttttctgggcaaaaaggarccttttgstctctgtgnaccctaagagcacactgcacagggaaaattggcccatccagacctgggctccactcttgatctctcttggtcctcttctggctcttttcctgggtggn

SEQ ID NO: 433 - DNA, 2553 bp, Homo sapiens
  misc_feature (2510): n equals a,t,g, or c
  misc_feature (2516): n equals a,t,g, or c
ggcacgaggcatccctgacgctctggatgtgagagtgccccaatgcctgacctctgcatcccccacccctctcttcccttcctcttctccagccaaagatggtgctccctgcatcttcggtggtacggtgtaccgcagcggagagtccttccagagcagctgcaagtaccagtgcacgtgcctggacggggcggtgggctgcatgcccctgtgcagcatggacgttcgtctgcccagccctgactgccccttcccgaggagggtcaagctgcccgggaaatgctgcgaggagtgggtgtgtgacgagcccaaggaccaaaccgtggttgggcctgccctcgcgggtgagtcgagtcttcctctaagtcagggtcgtgattctctcccagggagggagtcctaactgtgccgaccgaacgggggaaataccttatccaggcgttttacatggtgtttgtgtgctctgcyctcgcrgcttaccgactggaagacacgtttggcccagacccaactatgattagagccaactgcctggtccagaccacagagtggagcgcctgttccaagacctgtgggatgggcatctccacccgggttaccaatgacaacgcctcctgcaggctagagaagcagagccgcctgtgcatggtcaggccttgcgaagctgacctggaagagaacattaaggtacatgttctgctcctattaactatttttcacaggaaaaacagtggataggacccaacttagggctcttgccacgcttgttagtataagcccgttatctccaaaactatctaaccattgagctgttttgctggaatgagagcttgtgtaatagcaaccaccagttttccactacgaaatcttccacagggttagttaattcaagacattccaagagaggctctggctattttkgggacatagcaaatgagactcaaacttcctcccctcaaaatatwaacagaagtcagacaacagaagactaaaacamagrgggttgaagaaagscactcctcttgtagagtcgstgattttttttttcctctctcttttcccttgkcttccttaagaagggcaaaaagtgcatccgtactcccaaaatctccaagcctatcaagtttgagctttctggctgcaccagcatgaagacataccgagctaaattctgtggagtatgtaccgacggccgatgctgcaccccccacagaaccaccaccctgccggtggagttcaagtgccctgacggcgaggtcatgaagaagaacatgatgttcatcaagacctgtgcctgccattacaactgtcccggagacaatgacatctttgaatcgctgtactacaggaagatgtacggagacatggcatgaagccagagagtgagagacattaactcattagactggaacttgaactgattcacatctcatttttccgtaaaaatgatttcagtagcacaagttatttaaatctgtttttctaactgggggaaaagattcccacccaattcaaaacattgtgccatgtcaaacaaatagtctatcaaccccagacactggtttgaagaatgttaagacttgacagtggaactacattagtacacagcaccagaatgtatattaaggtgtggctttaggagcagtgggagggtaccagcagaaaggttagtatcatcagatagcatcttatacgagtaatatgcctgctatttgaagtgtaattgagaaggaaaattttagcgtgctcactgacctgcctgtagccccagtgacagctaggatgtgcattctccagccatcaagagactgagtcaagttgttccttaagtcagaacagcagactcagctctgacattctgattcgaatgacactgttcaggaatcggaatcctgtcgattagactggacagcttgtggcaagtgaatttgcctgtaacaagccagattttttaaaatttatattgtaaatattgtgtgtgtgtgtgtgtgtgtatatatatatatatgtacagttatctaagttaatttaaagttgtttgtgcctttttatttttgtttttaatgctttgatatttcaatgttagcctcaatttctgaacaccataggtagaatgtaaagcttgtctgatcgttcaaagcatgaaatggatacttatatggaaattctgctcagatagaatgacagtccgtcaaaacagattgtttgcaaaggggaggcatcagtgtccttggcaggctgatttctaggtaggaaatgtggtagcctcacttttaatgaacaaatggcctttattaaaaactgagtgactctatatagctgatcagttttttcacctggaagcatttgtttctactttgatatgactgtttttcggacagtttatttgttgagagtgtgaccaaaagttacatgtttgcacctttctagttgaaaataaagtgtatattttttctataaaaaaaaaaaaaaaaaaaaaaaaaaaaaaaaaaaaaaaaacccgggaattnccgganccggtacctgccaggcgtacttgtcatcagtgttcac

SEQ ID NO: 434 - DNA, 2532 bp, Homo sapiens
  misc_feature (2470): n equals a,t,g, or c
ggcgatttcatcatgctccgagccgggcggcgcgcgccgcttccgtcgccaccctctctggacagcccagggccgcagctcatgccctctccgcgtccagtgctgcttagaggtgctcgcgccgctctgctgctgctgctgccgccccggctcttagcccgaccctcgctcctgctccgccggtccctcagcgcggcctcctgcgccccgatctccttgcccgccgccgcctcccggagcagcatggacggcgcgggggctgaggaggtgctggcacctctgaggctagcagtgcgccagcagggagatcttgtgcgaaaactcaaagaagataaagcaccccaagtagacgtagacaaagcagtggctgagctcaaagcccgcaagagggttctggaagcaaaggagctggcgttacagcccaaagatgatattgtagaccgagcaaaaatggaagataccctgaagaggaggtttttctatgatcaagcttttgctatttatggaggtgttagtggtctgtatgactttgggccagttggctgtgctttgaagaacaatattattcagacctggaggcagcactttatccaagaggaacagatcctggagatcgattgcaccatgctcacccctgagccagttttaaagacctctggccatgtagacaaatttgctgacttcatggtgaaagacgtaaaaaatggagaatgttttcgtgctgaccatctattaaaagctcatttacagaaattgatgtctgataagaagtgttctgtcgaaaagaaatcagaaatggaaagtgttttggcccagcttgataactatggacagcaagaacttgcggatctttttgtgaactataatgtaaaatctcccattactggaaatgatctatcccctccagtgtcttttaacttaatgttcaagactttcattgggcctggaggaaacatgcctgggtacttgagaccagaaactgcacaggggattttcttgaatttcaaacgacttttggagttcaaccaaggaaagttgccttttgctgctgcccagattggaaattcttttagaaatgagatctcccctcgatctggactgatcagagtcagagaattcacaatggcagaaattgagcactttgtagatcccagtgagaaagaccaccccaagttccagaatgtggcagaccttcacctttatttgtattcagcaaaagcccaggtcagcggacagtccgctcggaaaatgcgcctgggagatgctgttgaacagggtgtgattaataacacagtattaggctatttcattggccgcatctacctctacctcacgaaggttggaatatctccagataaactccgcttccggcagcacatggagaatgagatggcccattatgcctgtgactgttgggatgcagaatccaaaacatcctacggttggattgagattgttggatgtgctgatcgttcctgttatgacctctcctgtcatgcacgagccaccaaagtcccacttgtagctgagaaacctctgaaagaacccaaaacagtcaatgttgttcagtttgaacccagtaagggagcaattggtaaggcatataagaaggatgcaaaactggtgatggagtatcttgccatttgtgatgagtgctacattacagaaatggagatgctgctgaatgagaaaggggaattcacaattgaaactgaagggaaaacatttcagttaacaaaagacatgatcaatgtgaagagattccagaaaacactatatgtggaagaagttgttccgaatgtaattgaaccttccttcggcctgggtaggatcatgtatacggtatttgaacatacattccatgtacgagaaggagatgaacagagaacattcttcagtttccctgctgtagttgctccattcaaatgttccgtcctcccactgagccaaaaccaggagttcatgccatttgtcaaggaattatcggaagccctgaccaggcatggagtatctcacaaagtagacgattcctctgggtcaatcggaaggcgctatgccaggactgatgagattggcgtggcttttggtgtcaccattgactttgacacagtgaacaagaccccccacactgcaactctgagggaccgtgactcaatgcggcagataagagcagagatctctgagctgcccagcatagtccaagacctagccaatggcaacatcacatgggctgatgtggaggccaggtatcctctgtttgaagggcaagagactggtaaaaaagagacaatcgaggaatgaggacaattttgacaacttttgaccacttgcgctaataaaaaaaaaaaaaactactcttatgtccactttacaaaagaaaacagcattgtgattactcccagggaccgtattttatcttcagtggctgcctgattttacccccacaattaaagttgaaggaatcctgaanaaaaaaaaaaaaaaaaaaaaaaaaaaaaagaaaaaaaaataaaaaaaaaaaaaaaaaaaaaa

SEQ ID NO: 435 - DNA, 1822 bp, Homo sapiens
ggctggcggcgggtccggktccgctgcctggcgctgcgggcggcgggccatggtggtttggattgagccgggcccggccggggcgccgagtcggagggggtggcagtgagcggcggcagaggctacggggctcggtttggctgactggggagtcggcaggcggcaggaaccatgcgaggccagcggagcctgctgctgggcccggcccgcctctgcctccgcctccttctgctgctgggttacaggcgccgctgtccacctctactccggggtctagtacagcgctggcgctacggcaaggtctgcctgcgctccctgctctacaactcctttgggggcagtgacaccgctgttgatgctgcctttragcctgtctactggctggtagacaacgtgatccgctggtttggagtggtgttcgtggtcctggtgatcgtgctgacaggctccattgtagctatcgcctacctgtgtgtcctgcctctcatcctccgaacctactcagtgccacgactctgctggcatttcttctatagccactggaatctgatcctgattgtcttccactactaccaggccatcaccactccgcctgggtacccaccccagggcaggaatgatatcgccaccgtctccatctgtaagaagtgcatttaccccaagccagcccgaacacaccactgcagcatctgcaacaggtgtgtgctgaagatggatcaccactgcccctggctaaacaattgtgtgggccactataaccatcggtacttcttctctttctgctttttcatgactctgggctgtgtctactgcagctatggaagttgggaccttttccgggaggcttatgctgccattgagaaaatgaaacagctcgacaagaacaaactacaggcggttgccaaccagacttatcaccagaccccaccacccaccttctcctttcgagaaaggatgactcacaagagtcttgtctacctctggttcctgtgcagttctgtggcacttgccctgggtgccctaactgtatggcatgctgttctcatcagtcgaggtgagactagcatcgaaaggcacatcaacaagaaggagagacgtcggctacaggccaagggcagagtatttaggaatccttacaactacggctgcttggacaactggaaggtattcctgggtgtggatacaggaaggcactggcttactcgggtgctcttaccttctagtcacttgccccatgggaatggaatgagctgggagccccctccctgggtgactgctcactcagcctctgtgatggcagtgtgagctggactgtgtcagccacgactcgagcactcattctgctccctatgttatttcaagggcctccaagggcagcttttctcagaatccttgatcaaaaagagccagtgggcctgccttagggtaccatgcaggacaattcaaggaccagcctttttaccactgcagaagaaagacacaatgtggagaaatcttaggactgacatccctttactcaggcaaacagaagttccaaccccagactaggggtcaggcagctagctacctaccttgcccagtgctgacccggacctcctccaggatacagcactggagttggccaccacctcttctacttgctgtctgaaaaaacacctgactagtacagctgagatcttggcttctcaacagggcaaagataccaggcctgctgctgaggtcactgccacttctcacatgctgcttaagggagcacaaataaaggtattcgatttttaaagawaaaaaaaaaaaaaaaaatttgggggggggggccccgtta

SEQ ID NO: 436 - DNA, 1030 bp, Homo sapiens
gttaaggcttctgctgaaactccccggccccaaccagtagacaaactggagaagatcctggagaagctgctgacccggttcccacagtgcaataaggcccagatgaccaacattcttcagcagatcaagacagcacgtaccaccatggcaggcctgaccatggaggaacttatccagttggttgctgcacgactggcagaacatgagcgggtggcagcaagtactcagccacttggtcgcatccgggccttgttccctgctccactggcccaaatcagtaccccaatgttcttgccttctgcccaagtttcatatcctggaaggtcttcacatgctccagccacctgtaagctatgtctaatgtgccagaaactcgtccagcccagtgagctgcatccaatggcgtgtacccatgtattgcacaaggagtgtatcaaattctgggcccagaccaacacaaatgacacttgtcccttttgtccaactcttaaatgacggacctgactggggaggaagaagaagagaaactgatgtgaacaggaagcgcgggttcaagatttctaaaactctatatttatacagtgacatatactcatgccatgtacatttttattatataggtaatgtgtgtatagaaagtctgtattccaatgttcgtaaatgaaactatgtatattatgcagaaacagtctgttccccctcatcttgcaattcctttgggggatgcagattgtagggaagatgatgtttagtttggccttgaaattatgatatccctgcccagggctgttttcaaatacaatataaaaaccacctaggaacctgctgttgctctaaggccattctgctttggtttggctcagcctctagtccatttccttaaggctcatgtatgcagatttaaagcctggtgctcacccactgtccaaccagatgccttgcttaccgaaagcctccagaagcctcagtattgttttagccactctactccaaatggataaaatgagactctgattgaggaaaaaaaagt

SEQ ID NO: 437 - DNA, 1632 bp, Homo sapiens
  misc_feature (14): n equals a,t,g, or c
  misc_feature (1602): n equals a,t,g, or c
  misc_feature (1616): n equals a,t,g, or c
  misc_feature (1617): n equals a,t,g, or c
  misc_feature (1628): n equals a,t,g, or c
ggcctgtggctgtnggccgcgtgcgggtgaccgccgagggccgaracatggttctgcagacgaccaaggggctgcggcttctctttgatggcgatgcccacctcctcatgtccatccccagccccttccgtggacggctctgtggcctctgtgggaacttcaatggcaactggagtgacgactttgtcctgcccaatggctcagcagcgtccagtgtggagaccttcggggctgcatggcgggygcccggctcctccaagggctgtggcgagggctgcgggccccaaggctgcccagtgtgcttggcagaggagactgcaccctatgagagcaacgaggcctgcgggcagctccggaacccccagggccccttcgcgacctgccaggcggtgctgagtccctctgagtacttccgccaatgcgtatacgacctgtgcgcgcaaaagggtgacaaagccttcctgtgccgcagcctggcagcctacacggcggcctgtcaggcagctggcgtggccgtgaagccctggaggacagacagcttctgcccgctccattgccccgcccacagccactactccatctgcactcgcacctgccagggatcctgtgcggctctctccggcctcacgggctgcaccacccgctgttttgagggctgtgagtgcgacgaccgyttcctgctttcccagggtgtctgcatccctgtccaagattgtggctgcacccataatggccgatacttgccggtaaactcctccctgctgacctcagactgcagcgagcgctgttcctgttcctcaagctctggcctgacatgccaggcagctggctgcccaccaggccgtgtatgtgaggtcaaggctgaagcccggaactgctgggccacccgtggtctctgtgtcctgtctgtgggtgccaacctcaccacctttgatggggcccgtggtgccaccacctctcctggtgtctatgagctctcttcccgctgcccaggactacagaataccatcccctggtaccgtgtagttgccgaagtccagatctgccatggcaaaacggaggctgtgggccaggtccacatcttcttccaggatgggatggtgacgttgactccaaacaagggtgtgtgggtgaatggtctccgagtggatctcccagctgagaagttagcatctgtgtccgtgagtcgtacacctgatggctccctgctagtccgccagaaggcaggggtccaggtgtggcttggagccaatgggaaggtggctgtgattgtcagcaatgaccatgctgggaaactgtgtggggcctgtggaaactttgacggggaccagaccaatgattggcatgactcccaggagaagccagcgatggagaaatggagagcgcaggacttctccccatgttatggctgatcagtcatccaccaggaacgaagatttcctgaagaagacctggtccctctggaggttgcrgtggctgaaggatgcatcatgtgctcctaccctgctctaccgcttttctgggtcacagaggccaaatgtgagagcattgaataaatatcttaagctaaaaaaaaaaaaraaaaagggccgataagggcanagggcccttggcanngagattcccgnttcc

SEQ ID NO: 438 - DNA, 1016 bp, Homo sapiens
  misc_feature (27): n equals a,t,g, or c
  misc_feature (993): n equals a,t,g, or c
  misc_feature (994): n equals a,t,g, or c
  misc_feature (995): n equals a,t,g, or c
actcgtgccgaattcggcacgagcggncacgagcaagccccatctcatcctggcacgccctactccactgccctggcagcagcaggtgtggccaatggaggggggtgctggcccccaggattcccccagccaaactgtctttgtcaccacgtggggctcacttttcatccttccccaacttccctagtccccgtactaggttggacagcccccttcggctacaggaaggcaggaggggtgagtcccctactccctcttcactgtggccacagcccccttgccctccgcctgggatctgagtacatattgtggtgatggagatgcagtcacttattgtccaggtgaggcccaagagccctgtggccgccacctgaggtgggctggggctgctcccctaaccctactttgcttccgccactcagccatttccccctcctcagatggggcaccaataacaaggagctcaccctgcccgctcccaacccccctcctgctcctccctgccccccaaggttctggttccatttttcctctgttcacaaactacctctggacagttgtgttgttttttgttcaatgttccattcttcgacatccgtcattgctgctgctaccagcgccaaatgttcatcctcattgcctcctgttctgcccacgatcccctcccccaagatactctttgtggggaagaggggctggggcatggcaggctgggtgaccgactaccccagtcccagggaaggtggggccctgcccctaggatgctgcagcagagtgagcaagggggcccgaatcgaccataaagggtgtaggggccacctcctccccctgttctgttggggaggggtagccatgatttgtcccagcctggggctccctctctggtttcctatttgcagttacttgaataaaaaaaatatccttttctggaaaaaaaaaaaaaaaaaaaaaaaaaaaaaaaaaaaaaaaaaaaaaaaaaaaaaaaaaaaaaannnggggggggcccccccccccca

SEQ ID NO: 439 - DNA, 594 bp, Homo sapiens
  misc_feature (476): n equals a,t,g, or c
  misc_feature (519): n equals a,t,g, or c
  misc_feature (530): n equals a,t,g, or c
  misc_feature (531): n equals a,t,g, or c
  misc_feature (539): n equals a,t,g, or c
ttgaaaaacgggtcgactggcmcgwccsgcccggagccagcggttctccaagcacccagcatcctgctagacgcgccgcgcaccgacggaggggacatgggcagagcaatggtggccaggctcgggctggggctgctgctgctggcactgctcctacccacgcagatttattccagtgaaacaacaactggaacttcaagtaactcctcccagagtacttccaactctgggttggccccaaatccaactaatgccaccaccaaggyggctggtggtgccctgcagtcaacagccagtctcttcgtggtctcactctctcttctgcatctctactcttaagagactcaggccaagaaacgtcttctaaatttccccatcttctaaacccaatccaaatggcgtctggaagtccaatgtggcaaggaaaaacaggtcttcatcgaatctactaattccacaccttttaaaaatttttngggaacccaacccaaagggtaaaaaaaaaaaaaaatttggggntttttttgggnnaaaggggnaaaaaaaatttttccccccccccccaaaaaaaaaaaaaaattttttttttttttt

SEQ ID NO: 440 - DNA, 1580 bp, Homo sapiens
  misc_feature (873): n equals a,t,g, or c
gcccacgcgttcgcaaggctgccccatctggcgctgattatcctgctgctgccgccaccgctgctgctgctctgcaaaattcagctgctgcctctgtcttgaggaccccagcgcctttcccccggggccatgctgcctgcagccacagcctccctcctggggcccctcctcactgcctgcgccctgctgccttttgcccagggccagacccccaactacaccagacccgtgttcctgtgcggaggggatgtgaagggggaatcaggttacgtggcaagtgaggggttccccaacctctacccccctaataaggagtgcatctggaccataacggtccccgagggccagactgtgtccctctcattccgagtcttcgacctggagctgcaccccgcctgccgctacgatgctctggaggtcttcgctgggtctgggacttccggccagcggctcggacgcttttgtgggaccttccggcctgcgcccctagtcgcccccggcaaccaggtgaccctgaggatgacgacggatgagggcacaggaggacgaggcttcctgctctggtacagcgggcgggccacctcgggcactgagcaccaattttgcggggggcggctggagaaggcccagggaaccctgaccacgcccaactggcccgagtccgattaccccccgggcatcagctgttcctggcacatcatcgcgcccccggaccaggtcatcgcgctgaccttcgagaagtttgacctggagccggacacctactgccgctatgactcggtcagcgtgttcaacggagccgtgagcgacgactcccggaggctggggaagttctgcggcgacgcaktcccgggctccatctcctccgaaggnaatgaactcctcgtccagttcgtctcagatctcagtgtcaccgctgatggcttctcagcctcctacaagaccctgccgcggggcactgccaaagaagggcaagggcccggccccaaacggggaactgagcctaaagtcaagctgccccccaagtcccaacctccggagaaaacagaggaatctccttcagcccctgatgcacccacctgcccaaagcagtgccgccggacaggcaccttgcagagcaacttctgtgccagcagccttgtggtgactgcgacagtgaagtccatggttcgggagccaggggagggccttgccgtgactgtcagtcttattggtgcttataaaactggaggactggacctgccttctccacccactggtgcctccctgaagttttacgtgccttgcaagcagtgcccccccatgaagaaaggagtcagttatctgctgatgggccaggtagaagagaacagaggccccgtccttcctccagagagctttgtggttctccaccggcccaaccaggaccagatcctcaccaacctaagcaagaggaagtgcccctctcaacctgtgcgggctgctgcgtcccaggactgagacgcaggccagccccggcccctagccctcaggccttctttcttatccaaataaatgtttcttaatgaggaatgggtcagatctccatgcttatggtaaaa

SEQ ID NO: 441 - DNA, 1082 bp, Homo sapiens
  misc_feature (136): n equals a,t,g, or c
  misc_feature (462): n equals a,t,g, or c
  misc_feature (465): n equals a,t,g, or c
  misc_feature (1074): n equals a,t,g, or c
ctgccgagcgcctcttggagctgggctttcccccgcggtgcggcgccaggagccgccttttccgctgggtgtcactcgggggtggggaagatggcccattcaaaagcgccgcgagggggcccggccagtgcccttnagtgagcgctcgcaagaggacggcagaggcccggcagctcggagctccgggaccttgtggcgcatcaggacgcggctgtccctctgccgggacccagagccgccgccgccgctctgcctcctgcgtgttagcctcctctgcgcgctccgggcaggcggccgtgggagccgctggggcgaggacggcgcgaggctgctgctgctgcccccggcccgcgcggctggaaacggagaggccgagccaagcggcggcccctcttatgctgggaggatgctggagagtagcggctgcaaagcgctgaaggagggcgtgctggagaagcgcanacngggttgttgcagctctggaagaaaaagtgttgcatcctcaccgaggaagggctgctgcttatcccgcccaagcagctgcaacaccagcagcagcagcaacagcagcagcagcagcagcaacaacagcccgggcaggggccggccgagccgtcccaacccagtggccccgctgtcgccagcctcgagccgccggtcaagctcaaggaactgcacttctccaacatgaagaccgtggactgtgtggagcgcaagggcaagtacatgtacttcactgtggtgatggcagagggcaaggagatcgactttcggtgcccgcaagaccagggctggaacgccgagatcacgctgcagatggtgcagtacaagaatcgtcaggccatcctggcggtcaaatccacgcggcagaagcagcagcacctggtccagcagcagcccccctcgcagccgcagccgcagccgcagctccagccccaaccccagcctcagcctcagccgcaaccccagccccaatcacaaccccagcctcagccccaacccaagcctcagccccagcagctccamccgtatycgcatycamattcamatycamaatcttatccttmatttggnaaccaaaa

SEQ ID NO: 442 - DNA, 1241 bp, Homo sapiens
agacgagcgtggcggccgcggctgctcggggccgcgctggttgcccattgacagcggcgtctgcagctcgcttcaagatggccgcttgctcgcattcattttctgctgaacgacttttaactttcattgtcttttccgcccgcttcgatcgcctcgsgccggctgctctttccgggattttttatcaagcagaaatgcatcgaacaacgagaatcaagatcactgagctaaatccccacctgatgtgtgtgctttgtggagggtacttcattgatgccacaaccataatagaatgtctacattccttctgtaaaacgtgtattgttcgttacctggagaccagcaagtattgtcctatttgtgatgtccaagttcacaagaccagaccactactgaatataaggtcagataaaactctccaagatattgtatacaaattagttccagggcttttcaaaaatgaaatgaagagaagaagggatttttatgcagctcatccttctgctgatgctgccaatggctctaatgaagatagaggagaggttgcagatgaagataagagaattataactgatgatgagataataagcttatccattgaattctttgaccagaacagattggatcggaaagtaaacaaagacaaagagaaatctaaggaggaggtgaatgataaaagatacttacgatgcccagcagcaatgactgtgatgcacttaagaaagtttctcagaagtaaaatggacatacctaatactttccagattgatgtcatgtatgaggaggaacctttaaaggattattatacactaatggatattgcctacatttatacctggagaaggaatggtccacttccattgaaatacagagttcgacctacttgtaaaagaatgaagatcagtcaccagagagatggactgacaaatgctggagaactggaaagtgactctgggagtgacaaggccaacagcccagcaggaggtattccctccacctcttcttgtttgcctagccccagtactccagtgcagtctcctcatccacagtttcctcacatttccagtactatgaatggaaccagcaacagccccagcggtaaccaccaatcttcttttgccaatagacctcgaaaatcatcagtaaatgggtcatcagcaacttcttctggttgatacctgagactgttaaggaaaaaaaaaaaaaaaaaaccccggccgctcccacttcagattggtaac

SEQ ID NO: 443 - DNA, 968 bp, Homo sapiens
cccacgcgtccgcaggaagccaactatttgaaatgcacgagaaactaagttgtatggcaaactctgtaataaaaaatctacagtcacgttggagatcaccatcccatgaaaattctatttagtattttcagagaaaattgaaggtttttttaaacatcactggatttcttgattgaggaaacaagttctgaaataatagcacaatttcaaagaagagactctttgcaaagttgataacatttcaaaccctgaaggacagtgacttattatgtwagttcaatkttgtaagtycattatgtwagatcctttttttttttcataatatgtattcttggctgctatgcgtggtttttcaggaaatttaattatcttactgagatgtgaaagcaaaactagtaacagaacttacattttatttcatgctttcttaaacccgtgcatattctggtgaaacatgtaaaatactttaagtaaaattgaacatttttatttgaatttttgctgaactgataaaggtgtttatatttttgtttgttkgtttgtttaattcatgtttgttgggactgaggtttaggaagtttgttactggttaaaaacctcaaatgaaatgcgaaagaatttgaatttttcctgcatatgtcaactttggacagctttcaagaaaaatgagaaaagtttcaacttctggcggttaaaatattaatgcagaatttactaagattttattcatttgcattagcaaatattcatgcagcagcagttgactgaaaatttattcttatgagacgtatagtattcatttttaaatgcatgattgtacattatgtatagacgacaatgtttttaatttataaatttcattctttgttaattgcatgggtttttctgcagcttattgtgaataccttggttctgttcaatagaaacattttgtatatattraatactgaaatatcaaaaaaaaaaaa

SEQ ID NO: 444 - DNA, 1360 bp, Homo sapiens
  misc_feature (114): n equals a,t,g, or c
  misc_feature (302): n equals a,t,g, or c
  misc_feature (330): n equals a,t,g, or c
cgccggagcgtcatctgcgactccaatgccactgcactggagcttcccggccttcctctttccctgccccagcccagcatccccgcggctgtcccgcagagtgctccaccgganccccaccgggaagagaccgtgaccgccaccgccacttcccaggtagcccagcagcctccagccgctgccgcccctggggaacaggccgtcgcgggccctgcccctcgactgtccccagcagtaccagcaaagaccgcccagtgtcccagcctagccttgtggggagcaaagaggagccgccgccggangaaagtggcagcggcggcgcaagcgcmnaaggagccacaggaggaacggagccagcagcaggatgatatcgaagagctggagaccaaggccgtgggaatgtctaacgatggccgctttctcaagtttgacatcgaaatcggcagaggctcctttaagacggtctacaaaggtctggacactgaaaccaccgtggaagtcgcctggtgtgaactgcaggatcgaaaattaacaaagtctgagaggcagagatttaaagaagaagctgaaatgttaaaaggtcttcagcatcccaatattgttagattttatgattcctgggaatccacagtaaaaggaaagaagtgcattgttttggtgactgaacttatgacgtctggaacacttaaaacgtatctgaaaaggtttaaagtgatgaagatcaaagttctaagaagctggtgccgtcagatccttaaaggtcttcagtttcttcatactcgaactccacctatcattcaccgcgatcttaaatgtgacaacatctttatcaccggccctactggctcagtcaagrttggagacctcggtctggcaaccctgaagcgggcttcttttgccaagagtgtgataggtaccccagagttcatggcccctgagatgtatgaggagaaatatgatgaatccgttgacgtttatgcttttgggatgtgcatgcttgagatggctacatctgaatatccttactcggagtgccaaaatgctgcgcagatctaccgtcgcgtgaccagtggggtgaagccagccagttttgacaaagtagcaattcctgaagtgaaggaaattattgaaggatgcatacgacaaaacaaagatgaaagatattccatcaaagaccttttgaaccatgccttcttccaagaggaaacaggagtacgggtagaattagcagaagaagatgatggagaaaaaatagccataaaattatggctacgtattgaagatattaagaaattaaagggaaaatacaaagataaaaaaaaaaaaaaaaaaaaaaaaaaaaaaaacacccaccgtgccg

SEQ ID NO: 445 - DNA, 1835 bp, Homo sapiens
  misc_feature (326): n equals a,t,g, or c
  misc_feature (1229): n equals a,t,g, or c
  misc_feature (1738): n equals a,t,g, or c
  misc_feature (1747): n equals a,t,g, or c
  misc_feature (1758): n equals a,t,g, or c
  misc_feature (1801): n equals a,t,g, or c
  misc_feature (1806): n equals a,t,g, or c
  misc_feature (1831): n equals a,t,g, or c
tcgacccacgcgtccgggatgaggcccggcctctcatttctcctagcccttctgttcttccttggccaagctgcaggggatttgggggatgtgggacctccaattcccagccccggcttcagctctttcccaggtgttgactccagctccagcttcagctccagctccaggtcgggctccagctccagccgcagcttaggcagcggaggttctgtgtcccagttgttttccaatttcaccggctccgtggatgaccgtgggacctgccagtgctctgtttccctgccagacaccamctttcccgtggacagagtggaacgyttggnaattcacagctcatgttctttctcagaagtttgagaaagaactttccaaagtgagggaatatgtccaattaattagtgtgtatgaaaagaaactgttaaacctaactgtccgaattgacatcatggagaaggataccatttcttacactgaactggacttcgagctgatcaaggtagaagtgaaggagatggaaaaactggtcatacagctgaaggagmsttttggtggaagctcagaaattgttgaccagctggaggtggagataagaaatatgactctcttggtagagaagcttgagacactagacaaaaacaatgtccttgccattcgccgagaaatcgtggctctgaagaccaagctgaaagagtgtgaggcctctaaagatcaaaacacccctgtcgtccaccctcctcccactccagggagctgtggtcatggtggtgtggtgwacatcagcaaaccgtctgtggttcagctcaactggagagggttttcttatctatatggtgcttggggtagggattactctccccagcatccaaacaaaggactgtattgggtggcgccattgaatacagatgggagactgttggagtattatagactgtacaacacactggatgatttgctattgtatataaatgctcgagagttgcggatcacctatggccaaggtagtggtacagcagtttacaacaacaacatgtacgtcaacatgtacaacaccgggaatattgccagagttaacctgaccaccaacacgattgctgtgactcaaactctccctaatgctgcctataataaccgcttttmatatgctaatgttgcttggcaagatattgactttsctgtggatgagaatggattgtgggttatttattcaactgaagccagcactggtnacatggtgattagtaaactcaatgacaccacacttcaggtgctaaacacttggtataccaagcagtataaaccatctgcttctaacgccttcatggtatgtggggttctgtatgccacccgtactatgaacaccagaacagaagagattttttactattatgacacaaacacagggaaagagggcaaactagacattgtaatgcataagatgcaggaaaaagtgcagagcattaactataacccttttgaccagaaactttatgtctataacgatggttaccttctgaattatgatctttctgtcttgcagaagccccagtaagctgtttaggagttagggtgaaagagaaaatgtttgttgaaaaaatagtcttctccacttacttagatatctgcaggggtgtctaaaagtgtgttcattttgcagcaatgtttargtgcatagttctaccacactagagatctaggacatttgtcttgatttggtgagtctcttggggatcatctngcytttcangcgcmttttgncataaagtcygtcyagggtgggattgtcagaggtctaggggcncttgngggcctaatggaacccttctgtgangaag

SEQ ID NO: 446 - DNA, 1355 bp, Homo sapiens
  misc_feature (55): n equals a,t,g, or c
ggcacgagcgcgtcgcacgggaagtcgaagcggagatcccggggtcgcgcgaganccgcaagcggagttggtgggcgctatgctatcacccgaggcagagcgagtgctgcggtaccttgtagaagtggaggagctcgccgaggaggtgctggcggacaagcggcagattgtggacctggacactaaaaggaatcagaatcgagagggcctgagggccctgcagaaggatctcagcctctctgaagatgtgatggtttgcttcgggaacatgtttatcaagatgcctcaccctgagacaaaggaaatgattgaaaaagatcaagatcatctggataaagaaatagaaaaactgcggaagcaacttaaagtgaaggtcaaccgcctttttgaggcccaaggcaaaccggagctgaagggttttaacttgaaccccctcaaccaggatgagcttaaagctctcaaggtcatcttgaaaggatgagactcaagaaccaagatgggggaccagcaaccccccagggtcatggaggacccaggaccctccaaccttgacacctgtaaggacaggatctgccctgtaagggccagccgtcaggaatctggccatgaaaacctctttgtagtgcttggctactctgtgatggcaggagggaaccttcagcctgtctggctgctggacctggacaccagggctcggtggacacaagatctattgacgggccttggtagccaccagtgggtgtgtggggcagtggctgtgggggtgtaagaatgactgcaacaggcacttcccaacaatggcctgctgttcacatggaccctgagcaaggaaggagggagggaggggcagagtggagtgtcattccagcattcctctcagaagggagagaggttttcaggctggtgccatgcgattggaataaagcaggaggctcatgggtggttgctgaatgaagaacagaatcttggtgctttgtggctcaccacagccatctgtggggcaggcacacacacctcccgccagctccaattttgcactttttccctgcttgattccaagagtaggtgctgcctagcagcccttcgtggccactctttactcaggagggccttgcagagtcctgcaccaggcctgggtgagtggatgcgcctcttaccatatgacacgtgtcaagatgcccttccgccccctctgaaagtggggcccggccagcactgctcgttactgtctgccttcagtggtctgaggtcccagtatgaactgccgtgaagtcaaaactcttatgtgttcattaagggctcaataaatgttagctgaatgaawaaaaaaaaaaaaaaaaamawaaaaaaaaaaa

SEQ ID NO: 447 - DNA, 375 bp, Homo sapiens
  misc_feature (153): n equals a,t,g, or c
  misc_feature (313): n equals a,t,g, or c
tgcctctgtgtgtgtgcaagacagagagataggctatttgtcaagtcagctagttgcctaggtatctttgtctcacatctggctgtttcctcctagagaaccatccagttggctttccaggtctggaggtgagctaatggatgagtgaatatnagcagtgggtgttcctcatctctttgaggatttgcctcagagttcactaccaagggatttctggaactaggwgccattctttacatcagttcttgagggttctttgatatcaggggcaaaatgatcccttctcttttctttcttatatcctgtgctttgnctcctgggtgatttctcttcaagtcagttgtgggaggtgcctaggaacaacgctaacacggg

SEQ ID NO: 448 - DNA, 1393 bp, Homo sapiens
  misc_feature (1360): n equals a,t,g, or c
  misc_feature (1383): n equals a,t,g, or c
tcttttacatgtttaaatttaaaccattcttcgtgaccccttttcttgggagattcatggcaagaacgagaagaatgatggtgcttgttaggggatgtcctgtctctctgaactttggggtcctatgcattaaataattttcctgacgagctcaagtgctccctctggtctacaatccctggcggctggccttcatcccttgggcaagcattgcatacagctcatggccctccctctaccataccctccacccccgttcgcctaagctcccttctccgggaatttcatcatttcctagaacagccagaacatttgtggtctatttctctgttagtgtttaaccaaccatctgttctaaaagaagggctgaactgatggaaggaatgctgttagcctgagactcaggaagacaacttctgcagggtcactccctggcttctggaggaaagagaaggagggcagtgctccagtggtacagaagtgagacataatggaatcaggcttcacctccaaggacacctatctaagccattttaaccctcgggattacctagaaaaatattacaagtttggttctaggcactctgcagaaagccagattcttaagcaccttctgaaaaatcttttcaagatattctgcctagacggtgtgaagggagacctgctgattgacatcggctctggccccactatctatcagctcctctctgcttgtgaatcctttaaggagatcgtcgtcactgactactcagaccagaacctgcaggagctggagaagtggctgaagaaagagccagaggcctttgactggtccccagtggtgacctatgtgtgtgatcttgaagggaacagagtcaagggtccagagaaggaggagaagttgagacaggcggtcaagcaggtgctgaagtgtgatgtgactcagagccagccactgggggccgtccccttacccccggctgactgcgtgctcagcacactgtgtctggatgccgcctgcccagacctccccacctactgcagggcgctcaggaacctcggcagcctactgaagccagggggcttcctggtgatcatggatgcgctcaagagcagctactacatgattggtgagcagaagttctccagcctccccctgggccgggaggcagtagaggctgctgtgaaagaggctggctacacaatcgaatggtttgaggtgatctcgcaaagttattcttccaccatggccaacaacgaaggacttttctccctggtggcgaggaagctgagcagacccctgtgatgcctgtgacctcaattaaagcaattcctttgacctgtcaaaaaaaaaaaaaaaaaaaaaaaaaaaaaaaaaaanaaaaaaaaaaaaaaaaaaaaaanaaaaaaaaaa

SEQ ID NO: 449 - DNA, 1663 bp, Homo sapiens
  misc_feature (57): n equals a,t,g, or c
  misc_feature (180): n equals a,t,g, or c
  misc_feature (621): n equals a,t,g, or c
aaagaacgggggtgatgtggttccacaatattacaaggaccccaaaaagctctgcgnagaggacttggagaagttggtgaccagggtaaaagtaggcagcgagccagcaaaagactgtttgccagcaaagccctcagaggccacctcagaccggtcagagggcagcagccgggacgcagnggtagcgacgagaacgaggagtcgagcgttgtggattacgtggaggtgacggtcggggaggaggatgcgatctcagatagatcagatagctggagtcaggctgcggcagaaggtgtgtcggaactggctgaatcagactccgactgcgtccctgcagaggctggccaggcctagacagggaagtctgttagaactgctgtgctgatcaacgggacgctccgtctttgaagaaagaagagatggtctctccccagccatgggccacccttgccagtractccaagtggaactacttagctcgcgtgtgcctggarggtgcgggaagtccagcgactctcagacgcacctcccagaggaccggtgggaattgttcatagtgccaaagtcctamtactgcgttttcaatgggtccttgtacatagtttgctcctctgscctagncctcacctcttgctatactggraccgatttgtacaatgtgggaattttgttaccyttttaatcaagggcaacttccttttccagcactaccattgtaaggttkttttcaggagggagggstaaccaccttgcttttctcttttctctttttcttttttttatttttgttttattaatttggggaaaggggtgttagcattagtgccatgatatctactggattttaagtagggagactttatttttaaaggtaggttgaaatttgggagatttctcggcaggaagggctgaaatccaggcccctgtctcaacttggagagaggtgacagacggcagatcttccaaatcaaattcctttccagttcttcccctggctgcctttttgggggtccctgccttagccccacacaaggctttctgaactgccaagaggggatctggcttctcaactgctcggcctcttgggcaggctgtgcccagccagccctgggagaactgggtagcaggtggctgacttctttaagcacctttctaaataccagcagaagaggctcccgcctctgttagcatgatcagtactattgtgacattaaaacaacaacaataagatcttcctatctggagggtacagaggtgaatggctttggttttcatttctcttcttcactgccttttctcggtgtggtatttgacaagattttagctcaaagcctcaccatgaattgattttttttgtttgtgtgtgtgtttgttttgggacaattttagatacctgagtgcactttttcagttagtcctaacttttaaaagaaggaaaaccaagagacatatctggtgtacgtgttgcagtatgaactctggttgcaatccctccccctcccacactgccccccatttgagtacrccgcacaagtcaaacgctaggaagtttgaataaaaccaatttttctaacttgttgctcatttgttgtaactcaataaagcaaagactaaacatttttataaaaaaaaaaaaaaaaaaaaaaaaaaaaaaaaaaaaaaa

SEQ ID NO: 450 - DNA, 1380 bp, Homo sapiens
gggtcgacccacgcgtccggcaccatgcgcgcagcagccatctccactccaaagttagacaaaatgccaggaatgttcttctctgctaacccaaaggaattgaaaggaaccactcattcacttctagacgacaaaatgcaaaaaaggaggccaaagacttttggaatggatatgaaagcatacctgagatctatgatcccacatctggaatctggaatgaaatcttccaagtccaaggatgtactttctgctgctgaagtaatgcaatggtctcaatctctggaaaaacttcttgccaaccaaactggtcaaaatgtctttggaagtttcctaaagtctgaattcagtgaggagaatattgagttctggctggcttgtgaagactataagaaaacagagtctgatcttttgccctgtaaagcagaagagatatataaagcatttgtgcattcagatgctgctaaacaaatcaatattgacttccgcactcgagaatctacagccaagaagattaaagcaccaacccccacgtgttttgatgaagcacaaaaagtcatatatactcttatggaaaaggactcttatcccaggttcctcaaatcagatatttacttaaatcttctaaatgacctgcaggctaatagcctaaagtgactggtccctggctgaagggaattaacagatagtatcaagcgcagaaggaatgtgccagtatggctccctgggtgaacagcttggccttttttgggtgtcttgacaggccaagaagaacaaatgactcagaatggattaacatgaaagttatccaggcgcagagttgaagaagcataagcaagacaaaaacagagagaccgcagaaggaggaagatactgtggtactgtcataaaaaacagtggagctctgtattagaaagcccctcagaactgggaaggccaggtaactctagttacacagaaactgtgactaaagtctatgaaactgattacaacagactgtaagaatcaaagtcaactgacatctatgctacatattattatatagtttgtactgagctattgaagtcccattaacttaaagtatatgttttcaaattgccattgctactattgcttgtcggtgttattttattttattgtttttgactttggaagagatgaactgtgtatttaacttaagctattgctcttaaaaccagggagtcagaatatatttgtaagttaaatcattggtgctaataataaatgtggattttgtattaaaatatatagaagcaatttctgtttacatgtccttgctacttttaaaaacttgcatttattcctcagattttaaaaataaataaataattcatttaaraaaaaaaaaaaaaaaaactcgag

SEQ ID NO: 451 - DNA, 926 bp, Homo sapiens
  misc_feature (687): n equals a,t,g, or c
  misc_feature (865): n equals a,t,g, or c
gttgcatcttcttgctgtcctagaaaaaatgatttcacagggtaacaataacaaaaatggaaagaatgagactggtaataacaacaacaaagatggatctaatcataaagctgaaagtggagctctaatagaagctgcaaaatcaaagatacatcagtacaaagtacgagcttatatccaaatgaagtctctgaaagcatgtaaaagggaaatcaagtcagtcatgaatacagctggaaattccgcaccctctctctttcttaaaagcaattttgagtacttaagaggtaattatcgaaaagccgtgaagctattaaatagttcaaacattgctgagcatccaggattcatgaaaacaggtgaatgcttgagatgcatgttctggaataaccttggttgcatccattttgccatgagcaagcacaatttgggaatattctactttaaaaaggctctgcaagagaatgacaatgtctgtgcacagctcagtgcaggtagcactgatccaggtaaaaaattttcaggaagacccatgtgtacgttactaaccaataagagatatgagttgctgtataactgtggaattcagcttcttcacattggaaggcctcttgctgccttcgaatgtctgattgaagctgttcaggtttatcatgcaaatcctcgcctctggctacggctggctgnaatgctgcattgctgccaataaggggacttctgaacaagaaactaaaggccttcccagcaaaaaaggaattgtacagtctattgttggkcaaggctatcatcgtaaaatagttttggcatcacagtctatacagaatactgtttatraatggtggggcagtcttcggccattcctgtnagccagtatgggagttttgcagcccatatgttctcagaaatgcctggtttgctggttacct

SEQ ID NO: 452 - DNA, 1642 bp, Homo sapiens
  misc_feature (147): n equals a,t,g, or c
  misc_feature (150): n equals a,t,g, or c
  misc_feature (1608): n equals a,t,g, or c
ggcacgaggcgcgagaggacgtgctctgccagccagtgggaaggcaggccgcgcgcgcgggagcgcggraggatcggcggctcgcggtcactggtccctggctcggttccccgcaccccggggctcacacttacccgcgcggaggancancggccgggtgtccacccccatcctgcgcccagtctcctcgattcccctcgctctgagccgggagagccgaacagctgaagagagttcactgactccccagccccaggtgggccttgtgcacatcatgaccagttttgaagatgctgacacagaagagacagtaacttgtctccagatgacggtttaccatcctggccagttgcagtgtggaatatttcagtcaataagttttaacagagagaaactcccttccagcgaagtggtgaaatttggccgaaattccaacatctgtcattatacttttcaggacaaacaggtttcccgagttcagttttctctgcagctgtttaaaaaattcaacagctcagttctctcctttgaaataaaaaatatgagtaaaaagaccaatctgatcgtggacagcagagagctgggctacctaaataaaatggacctgccatacaggtgcatggtcagattcggagagtatcagtttctgatggagaaggaagatggcgagtcattggaattttttgagactcaatttattttatctccaagatcactcttgcaagaaaacaactggccaccacacaggcccataccggagtatggcacttactcgctctgctcctcccaaagcagttctccgacagaaatggatgaaaatgagtcatgaacacagaaagtctaagaggagaaatatgatggatgaagagctctgtagatgctgtatagacactaaataagagttgattagggtagtatattatagtcatctgttatgctgtgaaatttggaattcartattatcattttgaagtctgtaaattgtgttagtcattaacttagtcacctgttgtattctggatctacacaaaattattttaactgctcttattaatctgtgaggattaatatacaaaaagtatcctttgagatgaagtcgtgttctcaaaataaggttatattattttctttttctgcttgattttcatcttgtgttttgctttgtttttgtaaggaaccatctcttggtttggtcacatcagttcacaacagccatttgttttcaaggtcaaggctccaggcaggttgttactggtgtttgcagcctgtcagtacttgcagtactggaataggttctaggctagtgtctgcgcgtcactgtggttttagcatgggaggacttatttgagaaatactaccttacttttctatgatttctttttacagagttatagtgtgtttactcctaagatgacagttctctttgtctatattcagcatctaagacaaatatttaaacattttaaagaaccactgtgttaagtttaggattatttacttaccaaattagaagtttgacttttatgtgttatacacaatcttaaaatttcacgaattcacctttttaatagtatccatgtacataataaaatcaaagtttaattagcnaaaaaaaaaaaaaaaaaaaaaaaaaaaaaaaaaa

SEQ ID NO: 453 - DNA, 2254 bp, Homo sapiens
gggagcagctctgtcgtcacacacgcctcttctacatggttcgggcacaggctggagcaggacatgcagaggaccgcagagcctcctgcacctragttctagactcaacggtgctctgcgccaggagcagaattttsctgaccgcttcctccctgaatgacgaggctgcccaagctctgggcaagacctgctgggaaggccctggtcagccccgtggtgcagaacatcacctcccctgatgaggatggcattagccccctgggttggctgctggaccagtacctggagtgtcaggaagctgtcttcaacccccagagccgcggcccagctttcttctcgcgggtgcgccgtctcactcacctgctggtgcatgtcgagccctgtgaggcaccccctcctgtggtggccactcctcggcccaaaggcagaaacagaagccacgactggagctccttggctacccggggccttccaagcagcatcatgagaaacctgacgcgctgttggcgggccgtggtggagaagcaggtgaacaattttytgacctcatcctggcgggatgatgactttgtgccacgctactgtragcactttaatattctgcagaactcaagctctgaactgtttgggcctcgggyagccttcttgctggcgctgcaaaatggctgtgcgggagccttgctgaagctcccttttctcaaagctgcccacgtgagtgagcagttcgcccggcacattgaccagcagatccagggcagccggatcggtggagcccaggaaatggagaggctggcacagctgcagcaatgcctgcaagctgtcctgattttctccggcttggagatagccaccacttttgagcattattaccagcactacatggcggaccgtctcctgggcgtggtctcgagctggctggagggggccgtgctggagcagatcggtccctgcttccccaaccgcctcccccagcagatgttgcagagcctgagcacctctaaggagctgcagcgccagttccacgtctaccagctccagcagctggatcaggaactcctgaagctggaggatacagagaagaaaatacaggtgggccttggggccagtggcaaggagcacaagagcgagaaggaagaggaagctggggcagcagcagtggtggatgtggcggagggagaggaggaagaggaggagaatgaggacctctactatgaaggggcaatgccagaagtgtctgtgcttgtcctgtcccgacactcctggcctgttgcctcaatctgccacacactgaaccccagaacctgcctgccctcctacctgaggggcactttgaacagatactccaacttctacaacaagagtcagagccaccctgcccttgagcgaggctcacagaggcgactgcagtggacgtggctgggctgggctgagctgcagtttgggaaccagaccctgcatgtgtccaccgtgcagatgtggctactgctgtatctcaacgacctgaaggcggtctctgtggagagtctgctggcgttctcagggctctccgcagacatgctcaatcaggcgattgggcccctcacctcttcaagaggccccctggaccttcacgagcaaaaggatataccaggaggggtcctcaagattcgagatggcagcaaggaacccaggtcgagatgggacattgtgcggctcatcccacctcagacgtacctgcaagctgagggtgaagacggccagaacttggagaagagacggaatcttctgaactgcctcatcgtccgaatcctcaaggcccatggagatgaggggctgcacattgaccagcttgtctgtctggtgctggaggcttggcagaagggcccgtgtcctcccaggggtttggtcagcagccttggtaaggggtctgcatgcagcagcactgacgtcctctcctgcatcctacacctcctgggcaagggcacgctgagacgccatgacgaccggccccaggtgctgtcctatgcagtccctgtgactgtcatggagcctcacactgagtccctgaacccaggctcctcaggccccaacccacccctcaccttccataccctacagattcgctcccggggtgtgccctatgcctcctgcactgccacccagagcttctctacttccggtagccctagacttggggtcaggggaaggtagagctggagcttttacagaaataaaacccaagagtttgattataaaaaaaaaaaaaaaaaaaaaa

SEQ ID NO: 454 - DNA, 1931 bp, Homo sapiens
ggcacgagggaaggagcaagagtgggaggcgcgcgcggaggccgcgacggacgcaagatggcgacggcgaccatagctctccaggtcaatggccagcaaggaggggggtccgagccggcggcggcggcggcagtggtggcagcgggagacaaatggaaacctccacagggcacagactccatcaagatggagaacgggcagagcacagccgccaagctggggctgcctcccctgacgcccgagcagcaggaggcccttcagaaggccaagaagtacgccatggagcagagcatcaagagtgtgctggtgaagcagaccatcgcgcaccagcagcagcagctcaccaacctgcagatggcagcagtgacaatgggctttggagatcctctctcacctttgcaatcgatggcggctcagcggcagcgggcgctggccatcatgtgccgcgtctacgtgggctctatctactatgagctgggggaggacaccatccgccaggcctttgccccctttggccccatcaagagcatcgacatgtcctgggactccgtcaccatgaagcacaagggctttgccttcgtggagtatgaggtccccgaagctgcacagctggccttggagcagatgaactcggtgatgctggggggcaggaacatcaaggtgggcagacccagcaacatagggcaggcccagcccatcatagaccagttggctgaggaggcacgggccttcaaccgcatctacgtggcctctgtgcaccaggacctctcagacgatgacatcaagagcgtgtttgaggcctttggcaagatcaagtcctgcacactggcccgggaccccacaactggcaagcacaagggctacggcttcattgagtacgagaaggcccagtcgtcccaagatgctgtgtcttccatgaacctctttgacctgggtggccagtacttgcgggtgggcaaggctgtcacaccgcccatgcccctactcacaccagccacgcctggaggcctcccacctgccgctgctgtggcagctgctgcagccactgccaagatcacagctcaggaagcagtggccggagcagcggtgctgggtaccctgggcacacctggactggtgtccccagcactgaccctggcccagcccctgggcactttgccccaggctgtcatggctgcccaggcacctggagtcatcacaggtgtgaccccagcccgtcctcctatcccggtcaccatcccctcggtgggagtggtgaaccccatcctggccagccctccaacgctgggtctcctggagcccaagaaggagaaggaagaagaggagctgtttcccgagtcagagcggccagagatgctgagcgagcaggagcacatgagcatctcgggcagtagcgcccgacacatggtgatgcagaagctgctccgcaagcaggagtctacagtgatggttctgcgcaacatggtggaccccaaggacatcgatgatgacctggaaggggaggtgacagaggagtgtggcaagttcggggccgtgaaccgcgtcatcatctaccaagagaaacaaggcgaggaggaggatgcagaaatcattgtcaagatctttgtggagttttccatagcctctgagactcataaggccatccaggccctcaatggccgctggtttgctggccgcaaggtggtggctgaagtgtacgaccaggagcgttttgataacagtgacctctctgcgtgacagtggtccctctccccggacttgcacttgttccttgtttcctctgggttttatagtgatacagtggtgtccccggggccaggcgcgctctgcccagcccagcctacagtgcggataaaggtgcggatgctgctggccctgaaaaaaaaaaaaaaaaaaaaaaaaaaaaaaaaaaaaaaaaaaaaaaaaaaaaa

SEQ ID NO: 455 - DNA, 771 bp, Homo sapiens
ggccacgaggtacgtcccggcgctccgcttggcccaagatggcggcctccgtgtgcagcgggttgctggggccacgggtgctgtcctggagccgagagctgccttgcgcttggcgcgccctgcacacctccccggtctgcgccaagaaccgggcggcccgagtacgcgtaagcaagggggacaagccggtgacctacgaggaggcacacgcgccgcactacatcgcccaccgtaaaggctggctgtcgctgcacacaggtaacctggatggagaggaccatgccgcagagcgaacggtggaggatgttttccttcgcaagttcatgtggggtaccttcccaggctgcctggctgaccagctggttttaaagcgccggggtaaccagttggagatctgtgccgtggtcctgaggcagttgtctccacacaagtactacttcctcgtgggctacagtgaaactttgctgtcctacttttacaaatgtcctgtgcgactccacctccaaactgtgccctcaaaggttgtgtataagtacctctagaacaatccccttttttccatcaagctgtagcctgcagagaatggaaacgtgggaaaggaatggtatgtgggggaaatgcatcccctcagaggactgaggcatagtctctcatctgctattgaataaagaccttctatcttgaaaaaaaaaaaaaaaaaaaaaaaaaaaaaaaaaaaaaaaaaaaaaaaaaaaaaaaaaaaaaaaaaaaaaaaaaaaaaaaaaggggggg

SEQ ID NO: 456 - DNA, 1169 bp, Homo sapiens
  misc_feature (1164): n equals a,t,g, or c
  misc_feature (1167): n equals a,t,g, or c
  misc_feature (1169): n equals a,t,g, or c
aattcggcacgagctctctctctctctctctctctctctctctctgcttagggttttcaggaaatttggaagctgccgcagtagttggagtctaaggactcgtgacaatcttcgggtgcccttcgagagaaaaggggaggatgccactggagtcatcctcttcaatgccactatccttcccatctctcttaccctcagtaccacacaatactaacccttcccctcctctgatgtcttacatcacctcccaggagatgaagtgtattcttcactggtttgccaattggtcaggtccccagcgtgaacgtttcctagaggacctggtagctaaggcagtgccagaaaaattacaaccactgctggatagtctggagcagcttagtgtgtctggggcagaccgaccaccttctatctttgagtgccagctacatctttgggatcagtggtttcgaggctgggctgagcaggagcgcaatgaatttgtcagacagctggagttcagtgagccagacttcgtggcaaagttttaccaagcagtggctgctacagctggtaaggactgataggcattcagaccaaagaagataaccatagctgatggagccatgactctctacaatgataactcaattcaaatgtgtcgcctaaagctctggaactggtattccaaccagctgaccgaactcactgaccagtacaggcatggttatttcaacattaatagcatgtcaactggactcctatttgtaaatgttatcaatctaagcaatccagctcatcagtctactagtttgcttctttccgagagatgtcaagtcctcaagaatttgatggcttcttctgcagctataaccacaaggaacctacacattgtaactcaagtccactgctggctcatgaaatgtgtaaagtagaaccctccttcccgagaaataagacaggacaataaaaggtggcgtttttgtactttacctggattccattggctggttttaccactcctatcagattgtagtgtaattgtgtgatacgcaaaccattagtttwcccagtgatgatttaataaaattatgaaaaatcaggagagggagataattagttgcttcctccttcacactgtttgaatcgaaaaaaaaaaaaaaaaaaaaaaaaaaaaaaaaaaanaanan

SEQ ID NO: 457 - DNA, 3249 bp, Homo sapiens
  misc_feature (3234): n equals a,t,g, or c
gcgcggccgggccggggcagccgggaagcgggtggggtggtgtgttacccagtagctcctgggacatcgctcgggtacgctccacgccgtcgcagccactgctgtggtcgccggtcggccgaggggccgcgatactggttgcccgcggtgtaagcagaattcgacgtgtatcgctgccgtcaagatggaggggcctttgtccgtgttcggtgaccgcagcactggggaaacgatccgctcccaaaacgttatggctgcagcttcgattgccaatattgtaaaaagttctcttggtccagttggcttggataaaatgttggtggatgatattggtgatgtaaccattactaacgatggtgcaaccatcctgaagttactggaggtagaacatcctgcagctaaagttctttgtgagctggctgatctgcaagacaaagaagttggagatggaactacttcagtggttattattgcagcagaactcctaaaaaatgcagatgaattagtcaaacagaaaattcatcccacatcagttattagtggctatcgacttgcttgcaaggcaagcagtgcgttatatcaatgaaaacctaattgttaacacagatgaactgggaagagattgcctgattaatgctgctaagacatccatgtcttccaaaatcattggaataaatggtgatttctttgctaacatggtagtagatgctgtacttgctattaaatacacagacataagaggccagccacgctatccagtcaactctgttaatattttgaaagcccatgggagaagtcaaatggagagtatgctcatcagtggctatgcactcaactgtgtggtgggatcccagggcatgcccaagagaatcgtaaatgcaaaaattgcttgccttgacttcagcctgcaaaaaacaaaaatgaagcttggtgtacaggtggtcattacagaccctgaaaaactggaccaaattagacagagagaatcagatatcaccaaggagagaattcagaagatcctggcaactggtgccaatgttattctaaccactggtggaattgatgatatgtgtctgaagtattttgtggaggctggtgctatggcagttagaagagttttaaaaagggaccttaaacgcattgccaaagcttctggagcaactattctgtcaaccctggccaatttggaaggtgaagaaacttttgaagctgcaatgttgggacaggcagaagaagtggtacaggagagaatttgtgatgatgagctgatcttaatcaaaaatactaaggctcgtacgtctgcatcgattatcttacgtggggcaaatgatttcatgtgtgatgagatggagcgctctttacatgatgcactttgtgtagtgaagagagttttggagtcaaaatctgtggttcccggtgggggtgctgtagaagcagccctttccatataccttgaaaactatgcaaccagcatggggtctcgggaacagcttgcgattgcagagtttgcaagatcacttcttgttattcccaatacactagcagttaatgctgcccaggactccacagatctggttgcaaaattaagagcttttcataatgaggcccaggttaacccagaacgtaaaaatctaaaatggattggtcttgatttgagcaatggtaaacctcgagacaacaaacaagcaggggtgtttgaaccaaccatagttaaagttaagagtttgaaatttgcaacagaagctgcaatcaccattcttcgaattgatgatcttattaaattacatccagaaagtaaagatgataaacatggaagttatgaagatgctgttcactctggagcccttaatgattgatctgatgttccttttatttataacaatgttaaatgcaattgtcttgtaccttgagttgagtattacacattaaagtaaagtacaagctgtaaacttgggtttttgtgatgtaggaaatggtttccatctgtactttggtcctctgatttcacatattgcaacctagtactttattagtttaaaaagaaattgaggttgttcaaagtttaagcaattcattctctctgaacacacattgctattcccatcccacccccaatgcacagggctgcaacaccacgacttctgcccattctctccagtgtgtgtaacagggtcacaagaattcgacagccagatgctccaagagggtggcccaaggctatagcccctccttcaatattgaccttctctgggtttaatccaagttctttaactattgcagcagagacagctgcaaaggcttcattgatttcaaatatgtcaacatcttccagtgaccaacctgcttttgtaacagcttgctttatggctggaattggtcctattcccataatggaaggctccacacccacttgggaccaggaaactatccgtgctaaaggtgtaagcccacgtttatcagcttctgacttcttcataagaacgacagctgcagcaccatcatttattcctgaagcattggctggggtgactgttcccgttccatcagtaagaaagtaaggctttagcttggacatggcttctatgttgctcccatggcgaggaaactcatctgttttaacttcaataagacctcttctagttgacaccaaaactggtacaatctctttgtcaaaatggccagctttctgtgcattctctgtcctgttctgggacagaactgcaaccttgtcctgatcttctctactcacttgccattttttggctacattttcagctgtaatacccatatgacagttgtgaaatgcatctgtaagaccatcacagagtatactgtcagtcagtggcatctcacctatctttactcctgttctcaagtaagccaagtgaggagccttgctcatattttccatgcctcctgcaaccacaatgctggagtctcctatccctattgactggactgcaaggcacacagcttttaggcctgacccacagatcatctggcagctccatgctggaacagagtagggaattcctgcacccacactggcttgtctaacaggattctgcccacagcctgctgccaagacatgtccaaagatgacctcagacacatcttccggagccacagtggccctcttcaagacttctttgatgacagtggagcccaggtcctggacaggaacagcagctaaggcaccattgaaggaacctgctggtctgagcaaaggtcaanggtgggtccacaact

SEQ ID NO: 458 - DNA, 1916 bp, Homo sapiens
  misc_feature (1895): n equals a,t,g, or c
  misc_feature (1902): n equals a,t,g, or c
gccacggcacgcagccagcaagttgtttttaaatgttaatatagaaaacagtgaaggattagctgaaaatatatgagcaggtgacattgaggtttactgaaatagccaatttgactggtgcttagactattgtgcagtaaacctaaaaggtagtggagaattgcttcctgctagcaggaagccttcatcttcttgagtacccaaaccaggcttcaggtgtcctttgaggatagccaggtttgaaatttttagtttctcaggaagagctcttctatgtggcaggggctgatagggcaaaataaaatgacaatttctttattgctacagagtatcctctataagttattaaacgagtgtaatggtataatgcccttccatcacacaacaggacaccaccccagttttgttttctgggtttcttccccctttgtaggaatcagataccttttgtagaaaaaaatggcttatgccacgtaaaggtgaatttttagaaaccaccttctaggcgtttttggaacccttactgaaatccctccccttgttacagatggcgtagaagtcacaagtctgttaattggactgttgcttctttgcctgttcctgctttctctttctgtctggatagtcaggaaaagatttaatgtttaatatttaaacaaaatatttaatgtctatacagtaaaattattcaaacttcaaaccagtattgaaagcagttggaaaccagctaatagtttcttaatctcagatttcgagatgaatgtaaactgtattcttttgaaatgtgcaagtgtttgattcatgccatttgataaacttctgccttgtagtcattgtttgatgggaccaacttgtaaagtatgagccttaaataaatctccatgctgaaaaatgtgttctaatgcaacacaaaaacatgaagtgactgcccagaggtagagttagtgtttaggtggaaagggagatgacagctttccaaagaaggacctaaaacacaccaagattgtcttctacaggaattgctgggcaggtctccgactaaaggtcttatgatgaaaaggaagaaacaagcccccaacacaaggctctgatactactggtaaatgtaggagagaattaagaatctgttaattaaaatccaaacagagcttatttcagtagtcaagttacctgacatgataattatttctgcaggataattgatgttttatgttcttttttggactttatcttcttgcaaaaatttctacaaaaattgttttcttcatccttgtggtgcttattcatctgagccgtctccacagtcccaatgcctctgctttttgttttacttttgtagcataaggtttttgcttttgctttgccttaagagttccctagggagttaccagggcttttcgttttgtgtagcttttgcagcatggatcaaacattggcttactgtgctaatgtgtgaagagaaaaaattctctaaagcaggtgagctttaatgaacaaatgtgtattttatctgagtttgagtagggtgcgttgtggattttgttttttgggttttttttttttttttgtaattatatgaagaaagtccagttctcataaatattgatcacttaaaaaacttactctttcttgaaaaggtacacatgtaaaatttaggaaaataactaaagtaggggctggaaccataagaagaatgtttatcagcacgttcatttattattttggatttggaacttggctttgtttttcaatagtgacaagaatggttcagttctaggaatgttctggaagatgctgttaattttactttaaaatgagaatctggtgttactgtattttatcgttttcaataaaacttcttaagtgttttggaaaaaaaaaaaaaaaaaaaattnctgcggnccgcaagggaattc

SEQ ID NO: 459 - DNA, 2773 bp, Homo sapiens
ggcagaggaccaatcggccccctagactgagacgttggcgtttgaaatcagccaatggcaggtctacactggagcttcctctccgcctccttcgcctagcctgcgagtgttctgagggaagcaaggaggcggcggcggccagcgagtggcgagtagtggaaacgttgcttctgaggggagcccaagatgaccggttctaacgagttcaagctgaaccagccacccgaggatggcatctcctccgtgaagttcagccccaacacctcccagttcctgcttgtctcctcctgggacacgtccgtgcgtctctacgatgtgccggccaactccatgcggctcaagtaccagcacaccggcgccgtcctggactgcgccttctacgatccaacgcatgcctggagtggaggactagatcatcaattgaaaatgcatgatttgaacactgatcaagaaaatcttgttgggacccatgatgcccctatcagatgtgttgaatactgtccagaagtgaatgtgatggtcactggaagttgggatcagacagttaaactgtgggatcccagaactccttgtaatgctgggaccttctctcagcctgaaaaggtatataccctctcagtgtctggagaccggctgattgtgggaacagcaggccgcagagtgttggtgtgggacttacggaacatgggttacgtgcagcagcgcagggagtccagcctgaaataccagactcgctgcatacgagcgtttccaaacaagcagggttatgtattaagctctattgaaggccgagtggcagttgagtatttggacccaagccctgaggtacagaagaagaagtatgccttcaaatgtcacagactaaaagaaaataatattgagcagatttacccagtcaatgccatttcttttcacaatatccacaatacatttgccacaggtggttctgatggctttgtaaatatttgggatccatttaacaaaaagcgactgtgccaattccatcggtaccccacgagcatcgcatcacttgccttcagtaatgatgggactacgcttgcaatagcgtcatcatatatgtatgaaatggatgacacagaacatcctgaagatggtatcttcattcgccaagtgacagatgcagaaacaaaacccaagtcaccatgtacttgacaagatttcatttacttaagtgccatgttgatgataataaaacaattcgtactccccaatggtggatttattactattaaagaaaccagggaaaatattaattttaatattataacaacctgaaaataatggaaaagaggtttttgaatttttttttttaaataaacaccttcttaagtgcatgagatggtttgatggtttgctgcattaaaggtatttgggcaaacaaaattggagggcaagtgactgcagttttgagaatcagttttgaccttgatgattttttgtttccactgtggaaataaatgtttgtaaataagtgtaataaaaatccctttgcattctttctggaccttaaatggtagaggaaaaggctcgtgagccatttgtttcttttgctggttatagttgctaattctaaagctgcttcagactgcttcatgaggaggttaatctacaattaaacaatatttcctcttggccgtccattattttctgaagcagatggttcatcatttcctgggctgttaaacaaagcgaggttaaggttagactcttgggaatcagctagttttcaatcttattagggtgcagaaggaaaactaataagaaaacctcctaatatcattttgtgactgtaaacaattatttattagcaaacaattgatcccagaagggcaaattgtttgagtcagtaatgagctgagaaaagacagagcatatctgtgtatttggaaaaataattgtaacgtaattgcagtgcatttagacaggcatctatttggacctgtttctatctctaaatgaatttttggaaacattaatgaggtttacatatttctctgacatttatatagttcttatgtccatttcagttgaccagccgctggtgattaaagttaaaaagaaaaaaattatagtgagaatgagattcatttcaatgtaatgcactaaagcagaacacgaacttagcttggcctattctaggtagttccaaatagtatttttgttgtcaaactttaaaatttatattaatttgcaaatgtatgtctctgaagtaggacttggacctttcctgagatttattttatccgtgatgtattttttttaattcttttgatacagagaagggtctttttttttttaagtatttcagtgaaaacttggtgtaagtctgaacccatcttttgaaatgtattttcttcattgcaggtccacctaatcatcctgtgaaagtggtttctctatggaaagctttgtttgcttcctacaaatacatgcttattccttaagggatgtgttagagttactgtggatttctctgttttctgtcttacaagaaacttgtctatgtaccttaatactttgtttaggatgaggagtctttgtgtccctgtacagtagtctgacgtatttccccttctgtcccctagtaagcccagttgctgtatctgaacagtttgagctctttttgtaatatactctaaacctgttatttctgtgctaataaacgagatgcagaacccttgaaaaaaaaaaaaaaaaaaaaaaaaaaaaaaaaaaaaaaaaaaaaaaagggsggccgctcgcgatctagaac

SEQ ID NO: 460 - DNA, 2031 bp, Homo sapiens
cccacgcgtccgcccacgcgtccgcccacgcgtccggcgccagcggcctcgccgcccgtcaagctgtccacatccctggcctcagcccgccacatcaccctgacctgcttacgcccagattttcttcaatcacatctgaataaatcacttgaagaaagcttatagcttcattgcaccatgtgtggcatttgggcgctgtttggcagtgatgattgcctttctgttcagtgtctgagtgctatgaagattgcacacagaggtccagatgcattccgttttgagaatgtcaatggatacaccaactgctgctttggatttcaccggttggcggtagttgacccgctgtttggaatgcagccaattcgagtgaagaaatatccgtatttgtggctctgttacaatggtgaaatctacaaccataagaagatgcaacagcattttgaatttgaataccagaccaaagtggatggtgagataatccttcatctttatgacaaaggaggaattgagcaaacaatttgtatgttggatggtgtgtttgcatttgttttactggatactgccaataagaaagtgttcctgggtagagatacatatggagtcagacctttgtttaaagcaatgacagaagatggatttttggctgtatgttcagaagctaaaggtcttgttacattgaagcactccgcgactccctttttaaaagtggagccttttcttcctggacactatgaagttttggatttaaagccaaatggcaaagttgcatccgtggaaatggttaaatatcatcactgtcgggatgaacccctgcacgccctctatgacaatgtggagaaactctttccaggttttgagatagaaactgtgaagaacaacctcaggatcctttttaataatgctgtaaagaaacgtttgatgacagacagaaggattggctgccttttatcagggggcttggactccagcttggttgctgccactctgttgaagcagctgaaagaagcccaagtacagtatcctctccagacatttgcaattggcatggaagacagccccgatttactggctgctagaaaggtggcagatcatattggaagtgaacattatgaagtcctttttaactctgaggaaggcattcaggctctggatgaagtcatattttccttggaaacttatgacattacaacagttcgtgcttcagtaggtatgtatttaatttccaagtatattcggaagaacacagatagcgtggtgatcttctctggagaaggatcagatgaacttacgcagggttacatatattttcacaaggctccttctcctgaaaaagccgaggaggagagtgagaggcttctgagggaactctatttgtttgatgttctccgcgcagatcgaactactgctgcccatggtcttgaactgagagtcccatttctagatcatcgattttcttcctattacttgtctctgccaccagaaatgagaattccaaagaatgggatagaaaaacatctcctgagagagacgtttgaggattccaatctgatacccaaagagattctctggcgaccaaaagaagccttcagtgatggaataacttcagttaagaattcctggtttaagattttacaggaatacgttgaacatcaggttgatgatgcaatgatggcaaatgcagcccagaaatttcccttcaatactcctaaaaccaaagaaggatattactaccgtcaagtctttgaacgccattacccaggccgggctgactggctgagccattactggatgcccaagtggatcaatgccactgacccttctgcccgcacgctgacccactacaagtcagctgtcaaagcttaggtggtctttatgctgtaatgtgaaagcaaatatttcttcgtgttggatggggactgtgggtagataggggaacaatgagagtcaactcaggctaacttgggtgtgaaaaaaataaaagtcctaaatctaaaaaaaaaaaaaaaaaaaaaaaaaaaaaaaaaaaaaaaa

SEQ ID NO: 461 - DNA, 1839 bp, Homo sapiens
  misc_feature (1496): n equals a,t,g, or c
  misc_feature (1832): n equals a,t,g, or c
  misc_feature (1839): n equals a,t,g, or c
gcgccgccgtcgtgcgtgccgctcggcggaggggacgggcctgcgttctctcctccttcctccccgcctccagctgccggcaggacctttctctcgctgccgctgggaccccgtgtcatcgcccaggccgagcacgatgccccctaaaaagggaggtgatggaattaaaccacccccaatcattggaagatttggaacctcactgaaaattggtattgttggattgccaaatgttgggaaatctactttcttcaatgtgttaaccaatagtcaggcttcagcagaaaacttcccgttctgcactattgatcctaatgagagcagagtacctgtgccagatgaaaggtttgactttctttgtcaataccacaaaccagcaagcaaaattcctgcctttctaaatgtggtggatattgctggccttgtgaaaggagctcacaatgggcagggcctggggaatgcttttttatctcatattagtgcctgtgatggcatctttcatctaacacgtgcttttgaagatgatgatatcacgcacgttgaaggaagtgtagatcctattcgagatatagaaataatacatgaagagcttcagcttaaagatgaggaaatgattgggcccattatagataaactagaaaaggtggctgtgagaggaggagataaaaaactaaaacctgaatatgatataatgtgcaaagtaaaatcctgggttatagatcaaaagaaacctgttcgcttctatcatgattggaatgacaaagagattgaagtgttgaataaacacttatttttgacttcaaaaccaatggtctacttggttaatctttctgaaaaagactacattagaaagaaaaacaaatggttgataaaaattaaagagtgggtggacaagtatgacccaggtgctttggtcattccttttagtggggccttggaactcaagttgcaagaattgagtgctgaggagagacagaagtatctggaagcgaacatgacacaaagtgctttgccaaagatcattaaggctgggtttgcagcactccaactagaatactttttcactgcaggcccagatgaagtgcgtgcatggaccatcaggaaagggactaaggctcctcaggctgcaggaaagattcacacagattttgaaaagggattcattatggctgaagtaatgaaatacgaagattttaaagaggaaggttctgaaaatgcagtcaaggctgctggaaagtacagacaacaaggcagaaattatattgttgaagatggagatattatcttcttcaaatttaacacacctcaacaaccgaagaagaaataaaatttagttattgctcagataaacatacaacttccaaaaggcatctgatttttaaaaaattaaaatttctgaaaaccaatgcgacaaataaagttggggagatgggaatctttgacaaacaaattatttttatttgttttaaaattaaaatactgtgtacccccccccncyccatgaaatgcaggttcactaaatgtgaacagctttgcttttcacgtgattaagaccctactccaaattgtagaagcttttcaggaaccatattactctcatgatacttcattaatctccatcatgtatgccaagcctgacacatttgacagtgaggacaatgtggcttgctcctttttgaatctacagataatgcatgttttacagtactccagatgtctacactcaataaaacatttgacaaaaccaaaaaaaaaaaaaaaaaaaaaaaaaaaaaaaaaaaaaaaaaaaaaaaaaaaaaaaaaaaaaaaaaaaaaaaaccccgggggggggnccccaan

SEQ ID NO: 462 - DNA, 779 bp, Homo sapiens
  misc_feature (26): n equals a,t,g, or c
  misc_feature (731): n equals a,t,g, or c
  misc_feature (737): n equals a,t,g, or c
  misc_feature (759): n equals a,t,g, or c
  misc_feature (762): n equals a,t,g, or c
aggcctgatgggctggagccagactntggtctgaggaggagacacagccttataagctgagggagtggagaggcccggggccaggaaagcagagacagacaaagcgttaggagaagaagagaggcagggaagacaagccaggcacgatggccaccttcccaccagcaaccagcgccccccagcagcccccaggcccggaggacgaggactccagcctggatgaatctgacctctatagcctggcccattcctacctcggaggtggaggccggaaaggtcgcaccaagagagaagctgctgccaacaccaaccgccccagccctggcgggcacgagaggaaactggtgaccaagctgcagaattcagagaggaagaagcgaggggcacggcgctgagacagagctggagatgaggccagaccatggacactacacccagcaatagagacgggactgcggaggaaggaggacccaggacaggatccaggccggcttgccacaccccccacccctaggacttattcccgctgactgagtctctgaggggctaccaggaaagcgcctccaaccctagcaaaagtgcaagatggggagtgagaggctgggaatggagggcagagccaggaagatcccccagaaaagaaagctacagaagaaactggggctcctccagggtggcagcaacaataaatagacacgcacggcarccamaaaaaaaaaaaaaagggsggnccgganccaattggcctaaagggggggnttncaattaatgggccgggt

SEQ ID NO: 463 - DNA, 1717 bp, Homo sapiens
  misc_feature (5): n equals a,t,g, or c
  misc_feature (27): n equals a,t,g, or c
ctagnaactggtgggtcccccgggccnggcattatttcgggcagagtggcaattactccgtgatctttgatgactattacwcataacagcactctagcaccttwtcttactggcatggacttcctcatggactgctacttcatggatgatagcttcattgctttgggtagggatttaaggtagtcaaggggaaaatacgcattttattacaggtcttaacatcaggcaactttcaactttaaaaccctttgtgaaaaatgtggttatagcactatagctctgattttaggatggttaaatgttatattcattgttggcttaccttatcaaactgtgccattaatcctttcacagacataggtaaggaagagaacaaccagtggattcaggggacaattatctatctccaaataataggcttttatttcttgcagctaactttttcagtgattctagcagatgccatctagtacatccttgatcttgtttstttcgtgagagatctcgccatggcagcatcttgttaagtaagtgtaattgcacatgcacaaaagacttaactagctttacatttagcagtcagttggttagattaggtttcatagtaaatgaataggaatagaaagaataggaagtgtttttattttccagtagtaattccgtggattccatttgacccagtttactatcagttcagttcaggtagatttggttcaacttttggtggtttttggctctaggatattcttgactttaatatcctagaacttactgagtcttcccttcaataaatacacttctcacatacctctaatcctatgcttccttgaaacaataatgctagctgagttgtttactaaggattattataagggcctgaaggtgtgggagtggagattaattaaaacctttatgttctccaatataagggaaaagcaggttggtactacttctgattaggcagaaaacaccaggattccttaagtgatccttgaaatggttattgttttctgccttgtcacatttgccactgtgccctttaaaacgatgtggaaacctcaggtttgtggacagcacaggtggaatgacatcttgtgcttcctgaggctcccctctaccaggcacattagcttagtgcttcagatgtcagcccaagtccttgttacctccttttcctgctgcccagggaagagtgtgtgtgctggagctggagcgcttgcactcttcaggtgactattctcacctccatttcctccacatgcattaggtgaaactgaggtctaagcctcctgcaaggtctacattttaaggactcacacatcaggctctcagaaatgtacacaggtattagttctgtttgttctaaaggaaatgtgggtatctctcaggccaggacttagtgactagttttcgctagacagcaggttaatacctagatctcatttaaaaaaaaaaaaaaaaaaacaggattaaagggaactgatcaggtttgttgagttttttagcctaattccaaagcatggaagagtgctctaggtaggaaagaaagctttttcttacgatttgtagctacctactgtgcctgacttggtgcctgtgtgaggattaagcccttagtctgctcttgcaattattcaaatgacaaattaaatttgcttttgtaataacaataaaagttgtcatcttcccttttgaaaaaaaaaaaaaaaaaaaaaag

SEQ ID NO: 464 - DNA, 828 bp, Homo sapiens
  misc_feature (787): n equals a,t,g, or c
  misc_feature (819): n equals a,t,g, or c
  misc_feature (827): n equals a,t,g, or c
ggcacgagagatggcggcgcaacagcgggactgcgggggtgctgcgcagctggcggggccggcggcggaggctgaccccctaggacgcttcacgtgtcccgtgtgcttagaggtgtacgagaagccggtacaggtgccctgcggacacgtcttttgctctgcatgcctgcaggaatgtctgaagccgaagaagcctgtctgtggggtgtgtcgcagcgctctggcacctggcgtccgagccgtggagctcgagcggcagatcgagagcacagagacttcttgccatggctgccgtaagaatttcttcctgtccaagatccggtcccacgtggctacttgttccaaataccagaattacatcatggaaggtgtgaaggccaccattaaggatgcatctcttcagccaaggaatgttccaaaccgttacacctttccttgtccttactgtcctgagaagaactttgatcaggaaggacttgtggaacactgcaaattattccatagcacggataccaaatctgtggtttgtccgatatgtgcctcgatgccctggggagaccccaactaccgcagcgccaacttcagagagcacatccagcgccggcaccggttttcttatgacacttttgtggattatgatgttgatgaagaggacatgatgaatcaggtgttgcagcgctccatcatcgaccagtgagcagagtccgtgcttgctatctgtctcatgttacagagcttccattacatattaaacgtgaaatctatgaaaaaaaaaaagggggggggncccggttaccccaatttcggccctattaggtnaagtcgtna

SEQ ID NO: 465 - DNA, 1173 bp, Homo sapiens
  misc_feature (137): n equals a,t,g, or c
  misc_feature (1166): n equals a,t,g, or c
  misc_feature (1168): n equals a,t,g, or c
  misc_feature (1171): n equals a,t,g, or c
cctgtcctgctgtctctgctgctgcttctgggtcctgctgtcccccaggagaaccaagatggtcgttactctctgacctatatctacactgggctgtccaagcatgttgaagacgtccccgcgtttcaggcccttgntcactcaatgacctccagttctttagatacaacagtaaagacaggaagtctcagcccatgggactctggagacaggtggaaggaatggaggattggaagcaggacagccaacttcagaaggccagggaggacatctttatggagaccctgaaagacatygtggagtattacaacgacagtaacgggtctcacgtattgcagggaaggtttggttgtgagatcgagaataacagaagcagcggacattctggaaatattactatgatggaaaggactacattgaattcaacaaagaaatcccagcctgggtccccttcgacccagcagcccagataaccaagcagaagtgggaggcagaaccagtctacgtgcagcgggccaaggcttacctggaggaggagtgccctgcgactctgcggaaatacctgaaatacagcaaaaatatcctggaccggcaagatcctccctctgtggtggtcaccagccaccaggccccaggagaaaagaagaaactgaagtgcctggcctacgacttctacccagggaaaattgatgtgcactggactcgggccggcgaggtgcaggagcctgagttacggggagatgttcttcacaatggaaatggcacttaccagtcctgggtggtggtggcagtgcccccgcaggacacagccccctactcctgccacgtgcagcacagcagcctggcccagcccctcgtggtgccctgggaggccagctaggaagcaagggttggaggcaatgtgggatctcagacccagtagctgcccttcctgcctgatgtgggagctgaaccacagaaatcacagtcaatggatccacaaggcctgaggagcagtgtggggggacagacaggaggtggatttggagaccgaagactgggatgcctgtcttgagtagacttggacccaaaaaatcatctcaccttgagcccacccccaccccattgtctaatctgtagaagctaataaataatcatccctccttgcctagcaaaaaaaaaaaaangnggngg

SEQ ID NO: 466 - DNA, 521 bp, Homo sapiens
taccagggtccggaatcccagggtcgacccacgcgtccgccggcaagatggcagaagtagagcagaagaagaagcggaccttccgcaagttcacctaccgcggcgtggacctcgaccagctgctggacatgtcctacgagcagctgatgcagctgtacagtgcgcgccaggcggcggctgaaccggggcctgcggcggaagcagcactccctgctgaagcgcctgcgcaaggccaagaaggaggcgccgcccatggagaagccggaagtggtgaagacgcacctgcgggacatgatcatcctacccgagatggtgggcagcatggtgggcgtytacaacggcaagaccttcaaccaggtggagatcaagcccgagatgatcggccactacctgggcgagttctccatcacctacaagcccgtaaagcatkgccggcccggcatcggggccacccactsctcccgmttcatccctctcaagtaatggctcagytaataaaggcgsacatgactccaaaaaaa

SEQ ID NO: 467 - DNA, 1428 bp, Homo sapiens
gcccgtctccccgcaggagcggcccccgccttacctggcagtcccaggacatggcgaggagtacccggtggctggggcacacagcagccccccaaaggcccgcttcctgcgggttcccagtgagcacccttacctgaccccatcccccgaatcccctgagcactgggccagcccctcacctccctccctctcagactggtccgaatccacgcctagcccagccactgccactggggccatggccaccaccactggggcactgcctgcccagccacttcccttgtctgttcccagctcccttgctcaggcccagacccagctggggccccagccggaagttacccccaagaggcaagtgttggcctgagacgctcgtcagttcttagatcttgggggcctaaagagacccccgtcctgcctcctttctttctctgtctcttccttccttttagtctttttcatcctcttctctttccaccaaccctcctgcatccttgccttgcagcgtgaccgagataggtcatcagcccagggcttcagtcttcctttatttataatgggtgggggctaccacccaccctgctcagtcttgtgaagagtctgggacctccttcttccccacttctctcttccctcattcctttctctctccttctggcctctcatttccttacactctgacatgaatgaattattattatttttctttttctttttttttttacattttgtatagaaacaaattcatttaaacaaacttattattattattttttacaaaatatatatatggagatgctccctccccctgtgaaccccccagtgcccccgtgggctgagtctgtgggcccattcggccaagctggattctgtgtacctagtacacaggcatgactgggatcccgtgtaccgagtacacgacccaggtatgtaccaagtaggcacccttgggcgcacccactggggccaggggtcgggggagtgttgggagcctcctccccaccccacctccctcacttcactgcattccagattggacatgttccatagccttgctggggaagggcccactgccaactccctctgccccagccccacccttggccatctccctttgggaactagggggctgctggtgggaaatgggagccagggcagatgtatgcattcctttatgtccctgtaaatgtgggactacaagaagaggagctgcctgagtggtactttctcttcctggtaatcctctggcccagccttatggcagaatagaggtatttttaggctatttttgtaatatggcttctggtcaaaatccctgtgtagctgaattcccaagccctgcattgtacagccccccactcccctcaccacctaataaaggaatagttaacactcaaaaaaaaaaaaaaaaaaaaacttgaggggggg

SEQ ID NO: 468 - DNA, 3463 bp, Homo sapiens
  misc_feature (1187): n equals a,t,g, or c
cagtgtccgggccgagccggtgcgccgcagactagggcgcctcgggccagggagcgcggaggagccatggccaccgctaacggggccgtggaaaacgggcagccggacaggaagccgccggccctgccgcgccccatccgcaacctggaggtcaagttcaccaagatatttatcaacaatgaatggcacgaatccaagagtgggaaaaagtttgctacatgtaacccttcaactcgggagcaaatatgtgaagtggaagaaggagataagcccgacgtggacaaggctgtggargctgcacaggttgccttccagaggggctcgccatggcgccggctggatgccctgagtcgtgggcggctgctgcaccagctggctgacctggtkgaragggaccgcgccaccttggccgccctggagacgatggatacagggaagccatttcttcatgcttttttcatcgacctggagggctgtattagaaccctcagatactttgcagggtgggcagacaaaatccagggcaagaccatccccacagatgacaacgtgtgtgcttcaccaggcatgagcccattggtgtctgtggggccatcactccatggaacttccccctgctgatgctggtgtggaagctggcacccgccctctgctgtgggaacaccatggtcctgaagcctgcggagacacctctcaccgccctttatctcggctctctgatcaaagaggccgggttccctccaggagtggtgaacattgtgccaggattcgggcccacagtgggagcagcaatttcttctcaccctcagatcaacaagatcgccttcaccggctccacagaggttggaaaactggttaaagaagctgcgtcccggagcaatctgaagcgggtgacgctggagctgggggggaagaacccctgcatcgtgtgtgcggacgctgacttggacttggcagtggagtgtgcccatcagggagtgttcttcaaccaaggccagtgttgcacggcagcctccagggtgttcgtggaggagcaggtctactctgagtttgtcaggcggacgtggagtatgccaagaaacggcccgtgggagaccccttcgatgtcaaaacagaacaggggcctcagattgatcaaaagcagttcgacaaaatcttagagctgatcgagagtgggaagaaggaangggccaagctggaatgcgggggctyagccatggaagacaaggggctcttcatcaaacccactgtcttctcagaagtcacagacaacatgcggattgccaaagaggagattttcgggccagtgcaccaatactgaagttcaaaagtatcgaagaagtgataaaaagagcgaatagcaccgactatggactcacagcagccgtgttcacaaaaaatctcgacaaagccctgaagttggcttctgccttagagtctggaacggtctggatcaactgctacaacgccctctatgcacaggctccatttggtggctttaaaatgtcaggaaatggcagagaactaggtgaatacgctttggccgaatacacagaagtgaaaactgtcaccatcaaacttggcgacaagaacccctgaaggaaaggcggggctccttcctcaaacatcggacggcggaatgtggcagatgaaatgtgctggaggaaaaaaatgacatttctgaccttcccgggacacattcttctggaggctttacatctactggagttgaatgattgctgttttcctctcactctcctgtttattcaccagactggggatgcctataggttgtctgtgaaatcgcagtcctgcctggggagggagctgttggccatttctgtgtttccctttaaaccagatcctggagacagtgagatactcagggcgttgttaacagggagtggtatttgaagtgtccagcagttgcttgaaatgctttgccgaatctgactccagtaagaatgtgggaaaaccccctgtgtgttctgcaagcagggctcttgcaccagcggtctcctcagggtggacctgcttacagagcaagccacgcctctttccgaggtgaaggtgggaccattccttgggaaaggattcacagtaaggttttttggtttttgttttttgttttcttgtttttaaaaaaaggatttcacagtgagaaagttttggttagtgcataccgtggaagggcgccagggtctttgtggattgcatgttgacattgaccgtgagattcggcttcaaaccaatactgcctttggaatatgacagaatcaatagcccagagagcttagtcaaagacgatatcacggtctaccttaaccaaggcactttcttaagcagaaaatattgttgaggttacctttgctgctaaagatccaatcttctaacgccacaacagcatagcaaatcctaggataattcacctcctcatttgacaaatcagagctgtaattcrctttaacaaattacgcatttctatcacgttcactaacagcttatgataagtctgtgtagtcttccttttctccagttctgttacccaatttagattagtaaagcgtacacaactggaaagactgctgtaataacacagccttgttatttttaagtcctattttgatattaatttctgattagttagtaaataacacctggattctatggaggacctcggtcttcatccaagtggcctgagtatttcactggcaggttgtgaatttttcttttcctctttggggatccaaatgatgatgtgcaatttcatgttttaacttgggaaactgaaagtgttcccatatagcttcaaaaacaaaaacaaatgtgttatccgacggatacttttatggttactaactagtactttcctaattgggaaagtagtgcttaagtttgcaaattaagttggggagggcaataataaaatgagggcccgtaacagaaccagtgtgtgtataacgaaaaccatgtataaaatgggcctatcacccttgtcagagatataaattaccacatttgccttcccttcatcagctaacacttatcacttatactaccaataacttgttaaatcaggatttggcttcatacactgaattttcagtattttatctcaagtagatatagacactaaccttgatagtgatacgttagagggttcctattcttccattgtacgataatgtctttaatatgaaatgctacattatttataattggtagagttattgtatctttttatagttgtaagtacacagaggtggtatatttaaacttctgtaatatactgtatttagaaatggaaatatatatagtgttaggtttcacttcttttaaggtttacccctgtggtgtggtttaaaaatctataggcctgggaattccgatcctagctgcagatcgcatcccacaatgcgagaatgataaaataaaattggatatttgagaaaaaaaaaaaaaa

SEQ ID NO: 469 - DNA, 621 bp, Homo sapiens
atggagaaggtccaggacacgtgggtgggggaagctgagcgctgagaccaagggctaaagctgggagactgaaaaaatgcagaccgccggggcattattcatttctccagctctgatccgctgttgtaccaggggtctaatcaggcctgtgtctgcctccttcttgaatagcccagtgaattcatctaaacagccttcctacagcaacttcccactccaggtggccagacgggagttccagaccagtgttgtctcccgggacattgacacagcagccaagtttattggtgctggggcagccacagttggtgtggctggttcaggggctggcattggaaccgtgtttggcagcttgatcattggctatgccaggaacccgtctctcaagcagcagctcttctcctatgccattcttggctttgccctgtctgaggccatggggcttttctgtttgatggtcgccttcctcatcctcttcgccatgtgaggctccatggggggtcaccggcctgttgctactgcaactccacaccattcttggtgctggggtgtgttaagctttaccattaaacacaacgtttctctaaaaaaaaaaaaaaaaaaaaaaaaaaaaaaaaaaaa

SEQ ID NO: 470 - DNA, 1833 bp, Homo sapiens
  misc_feature (126): n equals a,t,g, or c
  misc_feature (386): n equals a,t,g, or c
  misc_feature (524): n equals a,t,g, or c
  misc_feature (1798): n equals a,t,g, or c
  misc_feature (1812): n equals a,t,g, or c
tacgaccgacgagccggtgtcgtggtcgcggtacctgttccaacacggctcgcgggcccgtgccggctccggtccccggcgcggctgtccgagcccctgcggcgggcggacgatggtgtggcggancacgcagacgcgggcggcmgcggcggcgggcatgaaggaggatggaagggcaggacgaggtgtcggcgcgggagcagcacttccacagccaagtgcgggagtccacgatatgtttccttctttttgccattctctacgttgtttcctacttcatcatcacaagatacaagagaaaatcagatgaacaagaagatgaagatgccatcgtcaacaggatttcgttgtttttgagcacgttcactctcgcagtgtcagctggngctgttttgcttttacccttctcaatcatcagcaatgaaatcctgctttcttttcctcagaactactatattcagtggctaaatggctccctgattcatggtttgtggaatcttgcttcccttttttccaacctttgnttatttgtattgatgccctttgcctttttctttctggaatcagaaggctttgctggcctgaaaaagggaatccgagcccgcattttagagactttggtcatgcttcttcttcttgcgttactcattcttgggatagtgtgggtagcttcagcactcattgacaacgatgccgcaagcatggaatctttatatgatctctgggagttctatctaccctatttatattcctgtatatcattgatgggatgtttgttacttctcttgtgtacaccagttggcctttctcgtatgttcacagtgatgggtcagttgctagtgaagccaacaattcttgaagacctggatgaacaaatttatatcattaccttagaggaagaagcactccagagacgactaaatgggctgtcttcatcggtggaatacaacataatggagttggaacaagaacttgaaaatgtaaagactcttaagacaaaattagatccttggagttctttttctgtgcttcagtctcctgtctggcactttgctgcacagactccagctgacatagtctccccagattcccatttcatgctctcaactcaagggatgagctgggctcagcttgtgttcctccttcctgcatcacggcctggaaactctcaagacaagaggcgaaaaaaggcttcagcatgggaaagaaatttggtgtatcccgctgttatggttctccttcttattgagacatccatctcggtcctcttggtggcttgtaatattctttgcctattggttgatgaaacagcaatgccaaaaggaacaagggggsctggaataggaaatgcctctctttctacgtttggttttgtgggagctgcgcttgaaatcattttgattttctatcttatggtgtcctctgttgtcggcttctatagccttcgattttttggaaactttactcccaagaaagatgacacaactatgacaaagatcattggaaattgtgtgtccatcttggttttgagctctgctckgcctgtgatgtcgagaacactggggcttcataaacttcacttaccaaatacttcaagggattcagaaacagccaagccttctgtaaatgggcatcagaaagcactgtgagacgcacagacggcgtcttctgccaccaagagaccgagaactccagattcacgacattcctgtcccatgtagaagcatttccattcatccgtgggccctcttcagaacctagamctatcagtggcatttttttttcataatctacgaanaacttggctatggntgatcttttttaaatttaact

SEQ ID NO: 471 - DNA, 3202 bp, Homo sapiens
  misc_feature (4): n equals a,t,g, or c
  misc_feature (3160): n equals a,t,g, or c
  misc_feature (3180): n equals a,t,g, or c
cggnacgcgtgggactgcaacggagagactcaagatgattccctttttacccatgttttctctactattgctgcttattgttaaccctataaacgccaacaatcattatgacaagatcttggctcatagtcgtatcaggggtcgggaccaaggcccaaatgtctgtgcccttcaacagattttgggcaccaaaaagaaatacttcagcacttgtaagaactggtataaaaagtccatctgtggacagaaaacgactgtgttatatgaatgttgccctggttatatgagaatggaaggaatgaaaggctgcccagcagttttgcccattgaccatgtttatggcactctgggcatcgtgggagccaccacaacgcagcgctattctgacgcctcaaaactgagggaggagatcgagggaaagggatccttcacttactttgcaccgagtaatgaggcttgggacaacttggattctgatatccgtagaggtttggagagcaacgtgaatgttgaattactgaatgctttacatagtcacatgattaataagagaatgttgaccaaggacttaaaaaatggcatgattattccttcaatgtataacaatttggggcttttcattaaccattatcctaatggggttgtcactgttaattgtgctcgaatcatccatgggaaccagattgcaacaaatggtgttgtccatgtcattgaccgtgtgcttacacaaattggtacctcaattcaagacttcattgaagcagaagatgacctttcatcttttagagcagctgccatcacatcggacatattggaggcccttggaagagacggtcacttcacactctttgctcccaccaatgaggcttttgagaaacttccacgaggtgtcctagaaaggatcatgggagacaaagtggcttccgaagctcttatgaagtaccacatcttaaatactctccagtgttctgagtctattatgggaggagcagtctttgagacgctggaaggaaatacaattgagataggatgtgacggtgacagtataacagtaaatggaatcaaaatggtgaacaaaaaggatattgtgacaaataatggtgtgatccatttgattgatcaggtcctaattcctgattctgccaaacaagttattgagctggctggaaaacagcaaaccaccttcacggatcttgtggcccaattaggcttggcatctgctctgaggccagatggagaatacactttgctggcacctgtgaataatgcattttctgatgatactctcagcatggatcagcgcctccttaaattaattctgcagaatcacatattgaaagtaaaagttggccttaatgagctttacaacgggcaaatactggaaaccatcggaggcaaacagctcagagtcttcgtatatcgtacagctgtctgcattgaaaattcatgcatggagaaagggagtaagcaagggagaaacggtgcgattcacatattccgcgagatcatcaagccagcagagaaatccctccatgaaaagttaaaacaagataagcgctttagcaccttcctcagcctacttgaagctgcagacttgaaagagctcctgacacaacctggagactggacattatttgtgccaaccaatgatgcttttaagggaatgactagtgaagaaaaagaaattctgatacgggacaaaaatgctcttcaaaacatcattctttatcacctgacaccaggagttttcattggaaaaggatttgaacctggtgttactaacattttaaagaccacacaaggaagcaaaatctttctgaaagaagtaaatgatacacttctggtgaatgaattgaaatcaaaagaatctgacatcatgacaacaaatggtgtaattcatgttgtagataaactcctctatccagcagacacacctgttggaaatgatcaactgctggaaatacttaataaattaatcaaatacatccaaattaagtttgttcgtggtagcaccttcaaagaaatccccgtgactgtctataagccaattattaaaaaatacaccaaaatcattgatggagtgcctgtggaaataactgaaaaagagacacgagaagaacgaatcattacaggtcctgaaataaaatacactaggatttctactggaggtggagaaacagaagaaactctgaagaaattgttacaagaagaggtcaccaaggtcaccaaattcattgaaggtggtgatggtcatttatttgaagatgaagaaattaaaagactgcttcagggagacacacccgtgaggaagttgcaagccaacaaaaaagttcaaggatctagaagacgattaagggaaggtcgttctcagtgaaaatccaaaaaccagaaaaaaatgtttatacaaccctaagtcaataacctgaccttagaaaattgtgagagccaagttgacttcaggaactgaaacatcagcacaaagaagcaatcatcaaataattctgaacacaaatttaatatttttttttctgaatgagaaacatgagggaaattgtggagttagcctcctgtggtaaaggaattgaagaaaatataacaccttacaccctttttcatcttgacattaaaagttctggctaactttggaatccattagagaaaaatccttgtcaccagattcattacaattcaaatcgaagagttgtgaactgttatcccattgaaaagaccgagccttgtatgtatgttatggatacataaaatgcacgcaagccattatctctccatgggaagctaagttataaaaataggtgcttggtgtacaaaactttttatatcaaaaggctttgcacatttctatatgagtgggtttactggtaaattatgttattttttacaactaattttgtactctcagaatgtttgtcatatgcttcttgcaatgcatattttttaatctcaaacgtttcaataaaaccatttttcagatataaagagaattacttcaaattgagtaattcagaaaaactcaagatttaagttaaaaagtggtttggacttgggaacaggactttatacctcttttactgtaacaagtactcattaaaggaaattgaatgaaaaaaaaaaaaaaaaaggggcgggccgctctaagagggtnccctcgaggggggcccaagntttacgcggggcatgccgacgt

SEQ ID NO: 472 - DNA, 941 bp, Homo sapiens
  misc_feature (927): n equals a,t,g, or c
gttccaagtgccccttactgacccgagagacgtcattgccgcagagggacctatgggcgcatataggttgtaatgaaactgtagtctcagttggaagcctagacatgaaatgggtcagtgagcaaggctctattcctagtctccagccatgcctgtggcaacctgagcccgctctcagcacattggacccaggcagatgyaaaaaattcacagaactatgatttggactcaagggtttgtagatttcctccttcattctaatttcagtgtctaaaattcttgcatccrtgaacgagctgggcatttgatgagacagggcygaatactgcagttttcctcctagaaatcmtctggggcattttctttgaactgatgggaacaataaggcataactgtttgcacaaacttgggataartgattttgggataacgatctaccagaatggggatatttcacccttggttctgagatgcaaaccaaagaatatcatgaccagctttcaggcctcctgaagtatatctctcacattgtcctgttctcatgctgaggagcctgagatccctgtgtggggattagacagtggactgttatgggtgtaggtgaattggcttattttgtctgtccctgtctgaatgtattgcaggaattaaaaaggaccaagaagaggaagaagaccaaggcccaccatgccccaggctcagcagggagctgctggaggtagtagagcctgaagtcttgcaggactcactggatagatgttattcaactccttccagttgtcttgwaacagcctgactcctgccwgccctayrgaagttccttttatgcattggaggaaaaacatgttggcttttctcttggacgtgggagaaattgaaaagaaggggaaggggaagaaaagaaggggaagaagatcaaagaagganagaagaaggggacg

SEQ ID NO: 473 - DNA, 1279 bp, Homo sapiens
  misc_feature (1144): n equals a,t,g, or c
  misc_feature (1273): n equals a,t,g, or c
tcccgggtcgacccacgcgtccgcggacgcgtgggatcaacaaactcatccgaattggcaggaatgagtgtgtggttgtcattagggtggacaaagaaaaaggatatattgatttgtcaaaaagaagagtttctccagaggaagcaatcaaatgtgaagacaaattcacaaaatccaaaactgtttatagcattcttcgtcatgttgctgaggtgttagaatacaccaaggatgagcagctggaaagcctattccagaggactgcctgggtctttgatgacaagtacaagagacctggatatggtgcctatgatgcatttaagcatgcagtctcagacccatctattttggatagtttagatttgaatgaagatgaacgggaagtactcattaataatattaataggcgcttgaccccacaggctgtcaaaattcgagcagatattgaagtggcttgttatggttatgaaggcattgatgctgtaaaagaagccctaagagcaggtttgaattgttctacagaaaacatgcccattaagattaatctaatagctcctcctcggtatgtaatgactacgacaaccctggagagaacagaaggcctttctgtcctcagtcaagctatggctgttatcaaagagaagattgaggaaaagaggggtgtgttcaatgttcaaatggagcccaaagtggtcacagatacagatgagactgaacttgcgaggcagatggagaggcttgaaagagaaaatgccgaagtggatggagatgatgatgcagaagaaatggaagccaaagctgaagattaactttgtgggaaacagagtccaatttaaggaacacagagcagcgcttcctggctgtaaatcctagacttgaaagttttccagtattgaaaacttcaaagctgaatattttttatttctaagtatttaaatgttctaacagatcagaacatgaaatgccctcctaaatgtcagctgttgtcacacagtagctccaacactttgagcatttttaagggagtggcctcatttcactagagacaaatctttaagaatagttctaaaattgggcttgtgatttccatttctgatgtctccagattggcacccctttctagttcaatgcctcacgagatttnccaggggcatccaaggcaaacaatcccaatctttctatataaaatgtattcaagcaaacatcaaataaatttctgggatatttaaaaaaaaaaaaaaaaaaggggggggccttaaagaaccaagtttantttggg

SEQ ID NO: 474 - DNA, 3209 bp, Homo sapiens
  misc_feature (427): n equals a,t,g, or c
caactcccgggacacatccttcgagcagcatgtgctgtggcaacgggcgggaagggcgttgacctggtcttgaactccttggcggaagagaagctgcargccagcgtgaggtgcttggctacgcacggtcgcttcctggaaattggcaaattcgacctttctcagaaccamccgctcggcatggctatcttcctgaagaacgtgacatccacggggtcctactggatgcgttcttcaaacgagagcagtgctgactggcgggaggtgtgggcgcttgtgcaggccggcatccgggatggggtggtacggcccctcaagtgcacggtgttccatggggcccaggtggaggacgccttccgctacatggcccaagggaagcacattggcaaagtcgtcgtgcaggtgcttgcggaggagccggasagtngctgaagggggccaaacccaagctgatgtcggccatctccaagaccttctgcccggcccacaagagctacatcatcgctggtggtctgggtggcttcggcctggagttggcgcagtggctgatacagcgtggggtgcagaagctcgtgttgacttctcgctccgggatccggacaggctaccaggccaagcaggtccgccggtggaggcgccagggcgtacaggtgcaggtgtccaccagcaacatcagctcactggagggggcccggggsctcattgccgaggcggcgcasttgggcccgtgggcggcgtcttcaacctggccgtggtcttgagagatggcttgctggagaaccagaccccagagttcttccaggacgtctgcaagcccaagtacagcggcaccctgaacctggacagggtgacccgagaggcgtgccctgagctggactactttgtggtcttctcctctgtgagctgcgggcgtggcaatgcgggacagagcaactacggctttgccaattccgccatggagcgtatctgtgagaaacgccggcacgaaggcctcccaggcctggccgtgcagtggggcgccatcggcgacgtgggcattttggtggagacgatgagcaccaacgacacgatcgtcagtggcacgctgccccagcgcatggcgtcctgcctggaggtgctggacctcttcctgaaccagccccacatggtcctgagcagctttgtgctggctgagaaggctgcggcctatagggacagggacagccagcgggacctggtggaggccgtggcacacatyctgggcatccgcgacttggctgctgtcaacctggacagctcactggcggacctgggcctggactcgctcatgagcgtggaggtgcgccagacgctggagcgtgagctcaacctggtgctgtccgtgcgcgaggtgcggcaactcacgctccggaaactgcaggagctgtcctcaaaggcggatgaggccagcgagctggcatgccccacgcccaaggaggatggtctggcccagcagcagactcagctgaacctgcgctccctgctggtgaacccggaggccccaccctgatgcggctcaactccgtgcagagctcggagcggcccctgttcctggtgcacccaatcgagggctccaccaccgtgttccacagcctggcctcccggctcagcatccccacctatggcctgcagtgcacccgagctgcgccccttgacagcatccacagcctggctgcctactacatcgactgcatcaggcaggtgcagcccgagggcccctaccgcgtggccggctactcctacggggcctgcgtggcctttgaaatgtgctcccagctgcaggcccagcagagcccagcccccacccacaacagcctcttcctgttcgacggctcgcccacctacgtactggcctacacccagagctaccgggcaaagctgaccccaggctgtgaggctgaggctgagacggaggccatatgcttcttcgtgcagcagttcacggacatggagcacaacagggtgctggaggcgctgctgccgctgaagggcctagaggagcgtgtggcagccgccgtggacctgatcatcaagagccaccagggcctggaccgccaggagctgagctttgcggcccggtccttctactacaagctgcgtgccgctgagcagtacacacccaaggccaagtaccatggcaacgtgatgctactgcgcgccaagacgggtggcgcctacggcgaggacctgggcgcggactacaacctctcccaggtatgcgacgggaaagtatccgtccacgtcatcgagggtgaccaccgcacgctgctggagggcagcggcctggagtccatcatcagcatcatccacagctccctggctgagccacgcgtgagcgtgcgggagggctaggcccgtgcccccgcctgccaccggaggtcactccaccatccccaccccaccccaccccacccccgccatgcaacgggattgaagggtcctgccggtgggaccctgtccggcccagtgccactgccccccgaggctgctagacgtaggtgttaggcatgtcccacccacccgccgcctcccacggcacctcggggacaccagagctgccgacttggagactcctggtctgtgaagagccggtggtgcccgtgcccgcaggaactgggctgggcctcgtgcgcccgtggggtctgcgcttggtctttctgtgcttggatttgcatatttattgcattgctggtagagacccccaggcctgtccaccctgccaagactcctcaggcagcgtgtgggtcccgcactctgcccccatttccccgatgtcccctgcgggcgcgggcagccacccaagcctgctggctgcggccccctctcggccaggcattggctcagcccgctgagtggggggtcgtgggccagtccccgaggagctgggcccctgcacaggcacacagggcccggccacacccagcggccccccgcacagccacccgtggggtgctgcccttatgcccggcgccgggcaccaactccatgtttggtgtttgtctgtgtttgtttttcaagaaatgattcaaattgctgcttggattttgaaatttactgtaactgtcagtgtacacgtctggaccccgtttcatttttacaccaatttggtaaaaatgctgctctcagcctcccacaattaaaccgcatgtgatctccaaaaaaaaaaaaaaaaaaaaaaaamamgcgtccgc

SEQ ID NO: 475 - DNA, 833 bp, Homo sapiens
  misc_feature (9): n equals a,t,g, or c
  misc_feature (15): n equals a,t,g, or c
  misc_feature (29): n equals a,t,g, or c
  misc_feature (58): n equals a,t,g, or c
  misc_feature (73): n equals a,t,g, or c
accaccgangtggangaccgactactganaactagtggatcccccgggactgacaggnaattcggacacgagncagagatggctcccaatgcttcctgcctctgtgtgcatgtccgttccgaggaatgggatttaatgacctttgatgccaacccatatgacagcgtgaaaaaaatcaaagaacatgtccggtctaagaccaaggttcctgtgcaggaccaggttcttttgctgggctccaagatcttaaagccacggagaagcctctcatcttatggcattgacaaagagaagaccatccaccttaccctgaaagtggtgaagcccagtgatgaggagctgcccttgtttcttgtggagtcaggtgatgaggcaaagaggcacctcctccaggtgcgaaggtccagctcagtggcacaagtgaaagcaatgatcgagactaagacgggtataatccctgagacccagattgtgacttgcaatggaaagagactggaagatgggaagatgatggcagattacggcatcagaaagggcaacttactcttcctggcatsttattgtattggagggtgaccaccctgggcatggggtgttggcaggggtcaaaaagcttatttcttttaatctcttactcaacgaacacatcttctgatgatttcccaaaattaatgagaatgagatgagtagagtaagatttgggtgggatgggtaggatgaagtatattgcccaactctatgtttctttgattctaacacaattaattaagtgacatgatttttactaatgtattactgagactagtaaataaatttttaaggcaaaatagagc

SEQ ID NO: 476 - DNA, 1141 bp, Homo sapiens
  misc_feature (11): n equals a,t,g, or c
aaagtgtgggngtggcttttccctaacttgacycttctttcagtgggagrgaactattgagaggaacaaagagcttataaatacattaggacctggaattcagttgtcgagccaggacggtgacagcgtttaacaaagcttagagaaacctccaggagactgctatcatggcagagaagcccaagctccactacttcaatgcacggggcagaatggagtccacccggtggctcctggctgcagctggagtagagtttgaagagaaatttataaaatctgcagaagatttggacaagttaagaaatgatggatatttgatgttccagcaagtgccaatggttgagattgatgggatgaagctggtgcagaccagagccattctcaactacattgccagcaaatacaacctctatgggaaagacataaaggagagagccctgattgatatgtatatagaaggtatagcagatttgggtgaaatgatcctccttctgcccgtatgtccacctgaggaaaaagatgccaagcttgccttgatcaaagagaaaataaaaaatcgctacttccctgcctttgaaaaagtcttaaagagccatggacaagactaccttgttggcaacaagctgagccgggctgacattcatctggtggaacttctctactacgtcgaggagcttgactccagtcttatctccagcttccctctgctgaaggccctgaaaaccagaatcagcaacctgcccacagtgaagaagtttctacagcctggcagcccaaggaagcctcccatggatgagaaatctttagaagaagcaaggaagattttcaggttttaataacgcagtcatggaggccaagaacttgcaataccaatgttctaaagttttgcaacaataaagtactttacctaagtgttgattgtgcctgttgtgaagctaatgaactctttcaaattatatgctaattaaataatacaactcctattcgctgacttagttaaaattgatttgttttcattaggatctgatgtgaattcagatttccaatcttctcctagccaaccattttcctggaattaaaaattcagtaaaaaaggaaaaaaaaaaaaaaaaaaaaaaaaaaaaaaaaaaaaaaaaaaagg

SEQ ID NO: 477 - DNA, 1102 bp, Homo sapiens
tttgcacgtacggtccggaatcccgggtcgacccacgcgtccgggaattcatgtggaggtcagagtggaagcaggtgtgagagggtccagcagaaggaaacatggctgccaaagtgtttgagtccattggcaagtttggcctggccttagctgttgcaggaggcgtggtgaactctgccttatataatgtggatgctgggcacagagctgtcatctttgaccgattccgtggagtgcaggacattgtggtaggggaagggactcattttctcatcccgtgggtacagaaaccaattatctttgactgccgttctcgaccacgtaatgtgccagtcatcactggtagcaaagatttacagaatgtcaacatcacactgcgcatcctcttccggcctgtcgccagccagcttcctcgcatcttcaccagcatcggagaggactatgatgagcgtgtgctgccgtccatcacaactgagatcctcaagtcagtggtggctcgctttgatgctggagaactaatcacccagagagagctggtctccaggcaggtgagcgacgaccttacagagcgagccgccacctttgggctcatcctggatgacgtgtccttgacacatctgaccttcgggaaggagttcacagaagcggtggaagccaaacaggtggctcagcaggaagcagagagggccagatttgtggtggaaaaggctgagcaacagaaaaaggcggccatcatctctgctgagggcgactccaaggcagctgagctgattgccaactcactggccactgcaggggatggcctgatcgagctgcgcaagctggaagctgcagaggacatcgcgtaccagctctcacgctctcggaacatcacctacctgccagcggggcagtccgtgctcctccagctgccccagtgagggcccaccctgcctgcacctccgcgggctgactggccacagccccgatgattcttaacacagccttccttctgctcccaccccagaaatcactgtgaaatttcatgattggcttaaagtgaaggaaataaaggtaaaatcacttcagaaaaaaaaaaaaaaaaaaaaccccgggggggggc

SEQ ID NO: 478 - DNA, 4201 bp, Homo sapiens
  misc_feature (4077): n equals a,t,g, or c
  misc_feature (4161): n equals a,t,g, or c
  misc_feature (4186): n equals a,t,g, or c
gcggacgcgtgggcggacgcgtgggtscggacgcgtgggctcgcggcgccgcctcctgctcctcccgctgctgctgccgctgccgccctgagtcactgcctgcgcagctccggccgcctggctccccatactagtcgccgatatttggagttcttacaacatggcagacattgacaacaaagaacagtctgaacttgatcaagatttggatgatgttgaagaagtagaagaagaggaaactggtgaagaaacaaaactcaaagcacgtcagctaactgttcagatgatgcaaaatcctcagattcttgcagcccttcaagaaagacttgatggtctggtagaaacaccaacaggatacattgaaagcctgcctagggtagttaaaagacgagtgaatgctctcaaaaacctgcaagttaaatgtgcacagatagaagccaaattctatgaggaagttcaygatcttgaaaggaagtatgctgttctctatcagcctctatttgataagcgatttgaaattattaatgcaatttatgaacctacggaagaagaatgtgaatggaaaccagatgaagaagatgagatttcggaggaattgaaagaaaaggccaagattgaagatgagaaaaaggatgaagaaaaagaagaccccaaaggaattcctgaattttggttaactgtttttaagaatgttgacttgctcagtgatatggttcaggaacacgatgaacctattctgaagcacttgaaagatattaaagtgaagttctcagatgctggccagcctatgagttttgtcttagaatttcactttgaacccaatgaatattttacaaatgaagtgctgacaaagacatacaggatgaggtcagaaccagatgattctgatcccttttcttttgatggaccagaaattatgggttgtacagggtgccagatagattggaaaaaaggaaagaatgtcactttgaaaactattaagaagaagcagaaacacaagggacgtgggacagttcgtactgtgactaaaacagtttccaatgactctttctttaacttttttgcccctcctgaagttcctgagagtggagatctggatgatgatgctgaagctatccttgctgcagacttcgaaattggtcactttttacgtgagcgtataatcccaagatcagtgttatattttactggagaagctattgaagatgatgatgatgattatgatgaagaaggtgaagaagcggatgagggttatcagctctttgaagaagtcaaaagctgcagtaaacttttccaacgttggctgcagtaactattttcaataaaagctgtctggatgtctcaagttgtgttgggaaatttttcatattagaagctttcaaattaaattgtattatcatcaaagtctgtaatcatgaaaatctgttgatccgtagagtaacttgtattaaattttccctacattatgagccagtttacctactatgtacatacttcatggatgcattttgaactttaatataggaaggggaagaagaaggagatgaggaaaatgatccagactatgacccaaagaaggatcaaaacccagcagagtgcaagcagcagtgaagcaggatgtatgtggccttgaggataacctgcactggtctaccttctgcttccctggaaaggatgaatttacatcatttgacaagcctattttcaagttatttgttgtttgtttgcttgtttttgtttttgcagctaaaataaaaatttcaaatacaattttagttcttacaagataatgtcttaattttgtaccaattcaggtagaagtagaggcctaccttgaattaagggttatactcagtttttaacacattgttgaagaaaaggtaccagctttggaacgagatgctatactaataagcaagtgtaaaaaaaaaaaaaaaagaggaagaaaatcttaagtgattgatgctgttttcttttaaaaaaaaaaaaataaaattcattttctttgggttagagctagagagaaggccccaagcttctatggtttcttctaattcttattgcttaaagtatgagtatgtcacttacccgtgcttctgtttactgtgtaattaaaatgggtagtactgtttacctaactacctcatggatgtgttaaggcatattgagttaaatctcatataatgtttctcaatcttgttaaaagctcaaaattttgggcctatttgtaatgccagtgtgacactaagcattttgttcacaccacgctttgataactaaactggaaaacaaaggtgttaagtacctctgttctggatctgggcagtcagcactctttttagatctttgtgtggctcctatttttatagaagtggagggatgcactatttcacaaggtccaagatttgttttcagatatttttgatgactgtattgtaaatactacagggatagcactatagtattgtagtcatgagacttaaagtggaaataagactatttttgacaaaagatgccattaaatttcagactgtagagccacatttacaatacctcaggctaattactgttaattttggggttgaacttttttttgacagtgagggtggattattggattgtcattagaggaaggtctagatttcctgctcttaataaaattacattgaattgatttttagaggtaatgaaaacttcctttctgagaagttagtgttaaggtcttggaatgtgaacacattgtttgtagtgctatccattcctctcctgagattttaacttactactggaaatccttaaccaattataatagctttttttctttattttcaaaatgatttcctttgctttgattagacactatgtgctttttttttttaaccatagttcatcgaaatgcagctttttctgaacttcaaagatagaatcccatttttaatgaactgaagtagcaaaatcatctttttcattctttaggaaatagctattgccaaagtgaaggtgtagataatacctagtcttgttacataaaggggatgtggtttgcagaagaattttctttataaaattgaagttttaagggacgtcagtgtttatgccatttttccagttccaaaatgattccattccattctagaaatttgaagtatgtaacctgaaatccttaataaaatttggatttaattttataaaatgtactggtgatattttgggtgtttttttttaaatgaatgtatatactttttttttgaagagtggagagtagtgatgtctagagggagctattttgtgctgaggccactatgttctgtaaatatataattttaagagcaacctcacaatccctgctaagtggagtttattatttgaagactaaaatggaattccatagttcctgataggttatattctgrgttattattctgagttatctacaaacatttttgagatttgtctttacactctgattgtagtttccagcagcccatgcacactgccaagtaagtctcattttttcctgttagaaatggtgaaatatcatataatcacttataaagaaaactgatatgaaaaaattttagagttgtttgctttatggtcactcaagtagggtaagtgttccacaaattccacaagttgatagtttaacatggatgtctgaaagccacatatataatttcttaggattcttaaattagtaaatctagcttactgaagcagtattagcatcactattttagattgcaaaaataccttaattgtgtggaactggcttgtagagtggtacttaagaaaaatgggattctacctctatttctgttttagcacacttaatcaggaaaggatatattaactttcataaaaatatttttgttgtgtgaataggttaatgatatggtaaggcccctaaaataactgaattaattgtttattgtaattgtaggccattcccattattaaaaataaagacaaaacttgaagtaactgaaaatcttatcgtgctatgtagaaatattgaactaatattcaaatatttgaatgctttggtttcagggattggtttaaaattggagtccnttttttatggggttagtcttacaaaaatttaagcctttatatttttgactttaaatcaaaaccaaatgttattttaaatgtacnggaatwggattgggtaggtgcmggnaggartgtwaggttc

SEQ ID NO: 479 - DNA, 787 bp, Homo sapiens
  misc_feature (780): n equals a,t,g, or c
gcagagcgcatgctctctcttgcccgagatgccgaggattttgacaaggactccgtcgtcccggatgatagtgctcaggttaatgccagtgggagggcggcgcccaatagtaacttcctttggaggttgtagtaccgcccccagagccaattttccacttccgcktccggcgctgcggcagtccagatcaaaaatggcggtagttggtgtgtcctcggtttctcggctgctgggtcggtcccgcccacagctggggcggcctatgtcgagtggcgcccatggcgaagagggctcagctcgcatgtggaagactctcaccttcttcgtcgcgctccccggggtggcagtcagcatgctgaatgtgtacctgaagtcgcaccacggagagcacgagagacccgagttcatcgcctacccccatctccgcatcaggaccaagccgtttccctggggagatggtaaccatactctattccataaccctcatgtgaatccacttccaactggctacgaagatgaataaagagaatctggaccactacccgggcaccagggaccacagcactggtttggaccgttactctgcacatggaccagaaaaagtatatgggaccttaagctcaccttctttacttgtatcaaatgatgactggtatactggtctcccatccctttgcttgtggcaggagatggcttaaataaataacttaaayttaaaaaaaaaaaaaaaaaaaaaaaaaaaaaaaaaaaaaaaaaaaaaaaaaaaaaaaaaaaaaactnggggccg

SEQ ID NO: 480 - DNA, 731 bp, Homo sapiens
gaaaacccaggcagccagcgtggaggctgttaagatgctggatgagatcctcctgcagctgagcgcctcagtgcccgtggacgtgatgccaggcgagtttgatcccaccaattacacgctcccccagcagcccctccacccctgcatgttcccgctggccactgcctactccacgctccagctggtcaccaacccctaccaggccaccattgatggagtcagatttttggggacatcaggacagaacgtgagtgacattttccgatacagcagcatggaggatcacttggagatcctggagtggaccctgcgggtccgtcacatcagccccacagcccctgacactctaggttgttaccccttctacaaaactgacccgttcatcttcccagagtgcccgcatgtctacttttgtggcaacacccccagctttggctccaaaatcatccgaggtcctgaggaccagacagtgctgttggtgactgtccctgacttcagtgccacgcagaccgcctgccttgtgaacctgcgcagcctggcctgccagcccatcagcttctcgggcttcggggcagaggacgatgacctgggaggccttggctgggcccctgactcaaaaaagtggttttgaccagagaggcccagatggaggctgttcattccctgcagtgtcggcattgtaaataaagcctgagcacttgctgatgcgaaaaaaaaaaaaaaaaaaaaaa

SEQ ID NO: 481 - DNA, 1119 bp, Homo sapiens
aataacgtggcaaccacccacgagcccgcgtcggtgcccgccccgcagggggacctactatccggcgccgagccggaggggggaaacgrcgcccgccgcccgcccggagcccgcgagcaaccccagtcccccccacccgcgcgtggcggcgccggctccctagccaccgsggccccaccctcttccggcctcagctgtccgggctgctttcgcctccgcctgtggatgctgcgcctctccgaacgcaacatgaaggtgctccttgccgccgccctcatcgcggggtccgtcttcttcctgctgctgccgggaccttctgcggccgatgagaagaagaaggggcccaaagtcaccgtcaaggtgtattttgacctacgaattggagatgaagatgtaggccgggtgatctttggtctcttcggaaagactgttccaaaaacagtggataattttgtggccttagctacaggagagaaaggatttggctacaaaaacagcaaattccatcgtgtaatcaaggacttcatgatccagggcggagacttcaccaggggagatggcacaggaggaaagagcatctacggtgagcgcttccccgatgagaacttcaaactgaagcactacgggcctggctgggtgagcatggccaacgcaggcaaagacaccaacggctcccagttcttcatcacgacagtcaagacagcctggctagatggcaagcatgtggtgtttggcaaagttctagagggcatggaggtggtgcggaaggtggagagcaccaagacagacagccgggataaacccctgaaggatgtgatcatcgcagactgcggcaagatcgaggtggagaagccctttgccatcgccaaggagtagggcacagggacatctttctttgagtgaccgtctgtgcaggccctgtagtccgccacagggctctgagctgcactggccccggtgctggcatctggtggagcggacccactcccctcacattccacaggcccatggactcacttttgtaacaaactcctaccaacactgaccaataaaaaaaaatgtgggttttttttttttttaataaaaaaaaaaaaaaaaaaaaaaaaaaaaaaaaaaagg

SEQ ID NO: 482 - DNA, 2056 bp, Homo sapiens
  misc_feature (137): n equals a,t,g, or c
ccagccgagcgtcgcgaggccgccccccgccctgccggccgcctcgccgagcctcctggggcgcccgggcccgcgacccccgcacccagctccgcagaccggcgggcgcgcgcgggctctggaggccacgggcatgnatgcttcgggtcctggtgggggctgtcctccctgccatgctactggctgccccaccacccatcaacaagctggcactgttcccagataagagtgcctggtgcgaagcaagaacatcacccagatcgtgggccacagcggctgtgaggccaagtccatccagaacagggcgtgcctaggacagtgcttcagctacagcgtccccaacaccttcccacagtccacagagtccctggttcactgtgactcctgcatgccagcccagtccatgtgggagattgtgacgctggagtgcccgggccacgaggaggtgcccagggtggacaagctggtggagaagatcctgcactgtagctgccaggcctgcggcaaggagcctagtcacgaggggctgagcgtctatgtgcagggcgaggacgggccgggatcccagcccggcacccaccctcacccccatccccacccccatcctggcgggcagacccctgagcccgaggacccccctggggccccccacacagaggaagagggggctgaggactgaggcccccccaactcttcctcccctctcatccccctgtggaatgttgggtctcactctctggggaagtcaggggagaagctgaagcccccctttggcactggatggacttggcttcagactcggacttgaatgctgcccggttgccatggagatctgaaggggcggggttagagccaagctgcacaatttaatatattcaagagtggggggaggaagcagaggtcttcagggctctttttttggggggggggtggtctcttcctgtctggcttctagagatgtgcctgtgggagggggaggaagttggctgagccattgagtgctgggggaggccatccaagatggcatgaatcgggctaaggtccctgggggtgcagatggtactgctgaggtcccgggcttagtgtgagcatcttgccagcctcaggcttgagggagggctgggctagaaagaccactggcagaaacaggaggctccggccccacaggtttccccaaggcctctcaccccacttcccatctccagggaagcgtcgccccagtggcactgaagtggccctccctcagcggaggggtttgggagtcaggcctgggcaggaccctgctgactcgtggcgcgggagctgggagccaggctctccgggcctttctctggcttccttggcttgcctggtgggggaaggggaggaggggaagaaggaaagggaagagtcttccaaggccagaaggagggggacaaccccccaagaccatccctgaagacgagcatccccctcctctccctgttagaaatgttagtgccccgcactgtgccccaagttctaggccccccagaaagctgtcagagccggccgccttctcccctctcccagggatgctctttgtaaatatcggatgggtgtgggagtgaggggttacctccctcgccccaaggttccagaggccctaggcgggatgggctcgctgaacctcgaggaactccaggacgaggaggacatgggacttgcgtggacagtcagggttcacttgggctctctctagctccccaattctgcctgcctcctccctcccagctgcactttaaccctagaaggtggggacctggggggagggacagggcaggcgggcccatgaagaaagcccctcgttgcccagcactgtctgcgtctgctcttctgtgcccagggtggctgccagcccactgcctcctgcctggggtggcctggccctcctggctgttgcgacgcgggcttctggagcttgtcaccattggacagtctccctgatggaccctcagtcttctcatgaataaattccttcaacgccaaaaaaaaaaaaaaaaaaaaaaaaaaaaaaaaaaaaaamaggggggggccc

SEQ ID NO: 483 - DNA, 887 bp, Homo sapiens
tgctacaaataggaaggaattgtaataatgatatttggcctctactttgtcttagctgttaaactgtttttagtatttttgttaaatatttgcaaagggaagcattttctacagaggataattaatttcaagaaaaatatcttgagttttaagaaataaacatctccagaaaaggagaaagtcgattttataaaatgtcgcaactctccaacatttggggtagtgactccttttttgttaggacatttgaaactagcaagcagccattgtttctaaagaattctggcttcacattgactcatgtttctttcactccattttgaaatagctaaaaatcattaaaactgtaaatattttgttgcttgggtaagcatcttctgggaactttgtatctatggtatataatcatagaattttatattttcatataaagctaatttttttctagtttcaactccgtcatagttktttttcctttttgtggtggatatgtgaattcaactttctgtgtattgaagtagcaaaaaccatctttacattccaaaagaatccaacatgtgttatttctttgaggcagtgattgtgaaagttgggttttctttttaattccattgaccatttgtgcaataggaattagacataattagtcactgaaaacattcgtcacattgacccatttggaaaaagtgtgctttttttttttttttaaatttgttcagggggaggggttttgtaacctgaaatttttccctttttcttctgtttaaactatatcaaatcattctattatagtgttatttaatatgtaaattgtattgctatacataaaataaagtatggtttttgatgtaaaaaaaaaaaaaaaaaaaaaaaaaaaaaaaataaaa

SEQ ID NO: 484 - DNA, 1878 bp, Homo sapiens
  misc_feature (1446): n equals a,t,g, or c
tctcctcgtggctagttcaggcggaaggagcagtcctctgaagcttgaggagcctctagaactatgagcccgaggccttcccctctcccagagcgcagaggctttgaaggctacctctgggaagccgctcaccgtcggaagctgcgggagctgaaactgcgccatcgtcactgtcggcggccatgacaccgctcgtytcccgcctgaktcgtctgtgggccatcatgaggaagccacgagcagccgtgggaagtggtcacaggaagcaggcagccagccaggaagggaggcagaagcatgctaagaacaacagtcaggccaagccttctgcctgtgatggcctggccaggcagccggaagaggtggtattgcaggcctctgtctcctcataccatctattcagagacgtagctgaagtcacagccttccgagggagcctgctaagctggtacgaccaagagaaacgggacctaccatggagaagacgggcagaagatgagatggacctggacaggcgggcatatgctgtgtgggtctcagaggtcatgctgcagcagacccaggttgccactgtgatcaactactataccggatggatgcagaagtggcctacactgcaggacctggccagtgcttccctggaggaggtgaatcaactctgggctggcctgggctactattctcgtggccggcggctgcaggagggagctcggaaggtggtagaggagctagggggccacatgccacgtacagcagagaccctgcagcagctcctgcctggcgtggggcgctacacagctggggccattgcctctatcgcctttggccaggcaaccggtgtggtggatggcaacgtagcacgggtgctgtgccgtgtccgagccattggtgctgatcccagcagcacccttgtttcccagcagctctggggtctagcccagcagctggtggacccagcccggccaggagatttcaaccaagcagccatggagctaggggccacagtgtgtaccccacagcgcccactgtgcagccagtgccctgtggagagcctgtgccgggcacgccagagagtggagcaggaacagctcttagcctcagggagcctgtcgggcagtcctgacgtggaggagtgtgctcccaacactggacagtgccacctgtgcctgcctccctcggagccctgggaccagaccctgggagtggtcaacttccccagaaaggccagccgcaagccccccagggaggagagctctgccacctgtgttctggaacagcctggggcccttggggcccaaattctgctggtgcagaggcccaactcaggtctgctggcaggactgtgggagttcccgtccgtgacctgggagccctcagagcagcttcagcgcaaggccctgctgcaggaactacagcgttkggctggscccctcccagccacgcacntccggcaccttggggaggttgtccacaccttctctcacatcaagctgacatatcaagtatatgggctggccttggaagggcagaccccagtgaccaccgtaccaccaggtgctcgctgctgacgcaggaggaatttcacaccgcagctgtttccaccgccatgaaaaaggttttccgtgtgtatcagggccaacagccagggacctgtatgggttccaaaaggtcccaggtgtcctctccgtgcagtcggaaaaagccccgcatgggccagcaagtcctggataatttctttcggtctcacatctccactgatgcacacagcctcaacagtgcagcccagtgacacctctgaaagcccccattccctgagaatcctgttgttagtaaagtgcttatttttgtagttaaaaaaaaaaaaaaaaaaaaaaaaaa

SEQ ID NO: 485 - DNA, 1566 bp, Homo sapiens
ctttcatactaccctttagtcataaggagaaaaaaacactcaaatagtagaagcagcaagtagcaaacttcaggagagctactttctatccaaataatttaaaaaacacttttcacctactcctttcatggttataacacattggcagactttttgctggctctgggagccatgattttaatcacattctgcaaggtgacaaatgtcatacattccacattgtgtggtagccatctctttagactcatgtgttttggggaaaggaagaagttcttggctgagtactattttgaactttccagaaccctctcacaccagagacagttcttctctgttcagtttccaatccccgataatttgctaaaataacattgtacatccaagagagggaagaagagtatgtcagtatattatgcagaagatagatacagccttttcagaagatctccactagtttttgttccaaaaattcaagtttatgggagaaatctcaattagccaccttttcacagttgtgtggatataacatttgggggatctttctggactcctacctatctgtgcattttaccggcacctcaggaaaggagggtgaccaggttgtcttagcttgtactgcttggtgatctctgaggaccttctaattcagttgtaccccagtgttccatgtatagaaaaacttcattagaacaaactttacttgatatgaaactcctattaacagtctttttttgaaataaaaagtagcttgagctttcttttaaaatcatgtatcttgattgttgatttaatgaaggatttccttttaatgctgcttttgagcttcaaggtaataggacagcaggaacctaaaatatctgccatcatctgccataggaaagatacccagagacccatcatgttctctttttgttgttacactgttgggtgggtataacaattggaaaatgaacaaactgattgattgtgcaaactactttttatgacaagcctaaaccctcataatgcggcagcttaaagtgtatacatatgcactaactttgatcaattatattctcatatctgttagctacacagtctcctattatctcaattgcttatgtgcatatggaatatgttacttaaaacgtgtgcattcttactgaaaatgttttcaaaggaaggtatcagctgtgggctaattgccaccaatttcagcctgccacgattcttggaaatatgtcttccaagtgccatccatcatcagtaggacaagtgtcgggagtttgtttatttttttccagtagcaacgatgggttacatggagccatgaaacctccttctggcctcccttgtgattaatggcatgtgtttgtaaaatggatagctggggttggcagatggctagagaagaatcgcctttggtttaaaatgtatgtggtcccctaatgattgtgaccccattctgtaatcaactgagctagttccaataaagttaagcaggtttaaatccactttgtgcctatcttttcactgacaataaagttagctattttaaaatgcaaaaaaaaaaaaaaaaaaaaaatt

SEQ ID NO: 486 - DNA, 3046 bp, Homo sapiens
gtcgacccacgcgtccggacaccgccgcagttgccggtacatcggggatttctggctctttcctcttcgccttaaattcgggtgtcttttatgaataatcaaaagcagcaaaagccaacgctatcaggccagcgttttaaaactagaaaaagagatgaaaaagagaggtttgaccctactcagtttcaagactgtattattcaaggcttaactgaaaccggtactgatttggaagcagtagctaagtttcttgatgcttctggagcaaaacttgattaccgtcgatatgcagaaacactctttgacattctggtggctggtggaatgctggccccaggtggtacactggcagatgacatgatgcgtacagatgtctgcgtgtttgcagcccaagaagatctagagaccatgcaagcatttgctcaggtttttaacaagttaatcaggcgctacaaatacctggagaaaggttttgaagatgaagtaaaaaagctgctgctgttcttgaagggtttttcagagtcggagaggaacaagctagctatgttgactggtgttcttctggctaatggaacacttaatgcatccattcttaatagcctttataatgaaaatttggttaaagaaggagtttcagcagcttttgctgtgaagctctttaaatcatggataaatgaaaaagatatcaatgcagtagctgcaagtcttcggaaagtcagcatggataacagactgatggaactctttcctgccaataagcaaagtgttgaacacttcacaaaatattttactgaggcaggcttgaaagagctttcagaatatgttcggaatcagcaaaccatcggagctcgtaaggagctccagaaagaacttcaagaacagatgtcccgtggtgatccatttaaggatataattttatatgtcaaggaggagatgaaaaaaaacaacatcccagagccagttgtcatcggaatagtctggtcaagtgtaatgagcactgtggaatggaacaaaaaagaggagcttgtagcagagcaagccatcaagcacttgaagcaatacagccctctacttgctgcctttactactcaaggtcagtctgagctgactctgttactgaagattcaggagtattgctatgacaacattcatttcatgaaagccttccagaaaatagtggtgcttttttataaagctgaagtcctgagcgaggagcccattttgaagtggtataaagatgcacatgttgcaaaggggaagagtgttttccttgagcaaatgaaaaagtttgtagaatggctcaaaaatgctgaagaagaatctgaatctgaagctgaagaaggtgactgaattttgaaactacaccctcagtaaagcaaacaggagttgtagataaaatgtcatgtctcatgtgtcctggttcttacatcttcctacctccctgtatcaagcatgatataagggctttcatggcaaattttattttaactgtttctatggttgctggaaatgttgggtttagtttctaaaaccatgttttaagtagctacaggagctatagatttgaatctaatgttgcattagtcttttcagttatcttctacctcctgtattttctactgtaataatgtaatttaaggccttccacaatgaacagttcactttattccctgggttttctataaacagttttaaggatatgatttggttaaaaaataatttgttataaaaattctgtttgcaaattaaactggaaaagtatccagagtctcaaaaggcaatgatttgtgagataatatggcatgcccggagccctgctcatcaatgaaaaacccatatgtaataatcgaattcatttaacatgaatcttgagtacgtggaccattgcttgcatgttaactttttgttttgttttgttttgttttgttttgcatttttaactccagatatcctaaagctcaattgtttggtctctggttttcatccttagagaagccatggagaacagacttgaaaagtttaggaaatcataatgtggcagaggtggtgggaagaagaaagttgagctttttccccttgagaaacttctgcatttagtttctatctttccaggcaaaacaaatgggtattcttttcatacaaccattttcaaatgaaccttagaaaagtcttaacatttaaggtattttatgcacagaatacacttagattgataggaaagaactcgtaatggagtttgagtaaagaaaatgactgatgtactaaacccagtaaaaattgttgaaaatgttaaaggtcagcatgttctaattgggaatctagatatagcttagatttcctattggcttagagtatttgctataacaaatgaagtgcaatgacaattatatattcctactcggtcatactggactggcttcgttctcttaatatactcagtaatgactcaagcctctggctattaacataccctagttgccgttttttaattgccatgagccaaatacttcttggtatacaattgatccatttattttaatggctgccttttcattttcatcttttcttgctgctacccatctatgtatgtagtcattggggggaaaatgtagccacattttttatgggaagactttgtgttaaaagtgaacattttgaaggtttttaactggtgaaactagcctggaataatgccaccagagactgagtggaaatcgccccttttgaaggtgccattcttatgagccaaaagtttgtcatttaaaagttcattttgagggaataacatgtaatataatttgaaataaaggtatagtaaccttaaaaagaacattataactgattgttgtgaatggggtgaatttgttaaaatgagtaactttgataaagtttttcatgcacaggcaaaatgtattcactagatttctacgtagtgatctgcttttactttgtaatttgtagttctcaaaagacttttttttaaaaaaataaagtccatacttacacttaaaaaaaaaaaaaaaaaaaaaaaaaaaaaaaaaaaaaa

SEQ ID NO: 487 - DNA, 1904 bp, Homo sapiens
ctggtactgcagcgtaggcctcgcctcaacggcaggagagcaggcggctgcggttgctgcagccttcagtctccacccggactacgccatgttggggtttgtgggtcgggtggccgctgctccggcctccggggccttgcggagactcaccccttcagcgtcgctgcccccagctcagctcttactgcgggccgctccgacggcggtccatcctgtcagggactatgcggcgcaaacatctccttcgccaaaagcaggcgccgccaccgggcgcatcgtggcggtcattggcgcagtggtggacgtccagtttgatgagggactaccaccaattctaaatgccctggaagtgcaaggcagggagaccagactggttttggaggtggcccagcatttgggtgagagcacagtaaggactattgctatggatggtacagaaggcttggttagaggccagaaagtactggattctggtgcaccaatcaaaattcctgttggtcctgagactttgggcagaatcatgaatgtcattggagaacctattgatgaaagaggtcccatcaaaaccaaacaatttgctcccattcatgctgaggctccagagttcatggaaatgagtgttgagcaggaaattctggtgactggtatcaaggttgtcgatctgctagctccctatgccaagggtggcaaaattgggctttttggtggtgctggagttggcaagactgtactgatcatggagttaatcaacaatgtcgccaaagcccatggtggttactctgtgtttgctggtgttggtgagaggacccgtgaaggcaatgatttataccatgaaatgattgaatctggtgttatcaacttaaaagatgccacctctaaggtagcgctggtatatggtcaaatgaatgaaccacctggtgctcgtgcccgggtagctctgactgggctgactgtggctgaatacttcagagaccaagaaggtcaagatgtactgctatttattgataacatctttcgcttcacccaggctggttcagaggtgtctgcattattgggccgaatcccttctgctgtgggctatcagcctaccctggccactgacatgggtactatgcaggaaagaattaccactaccaagaagggatctatcacctctgtacaggctatctatgtgcctgctgatgacttgactgaccctgcccctgctactacgtttgcccatttggatgctaccactgtactgtcgcgtgccattgctgagctgggcatctatccagctgtggatcctctagactccacctctcgtatcatggatcccaacattgttggcagtgagcattacgatgttgcccgtggggtgcaaaagatcctgcaggactacaaatccctccaggatatcattgccatcctgggtatggatgaactttctgaggaagacaagttgaccgtgtcccgtgcacggaaaatacagcgtttcttgtctcagccattccaggttgctgaggtcttcacaggtcatatggggaagctggtacccctgaaggagaccatcaaaggattccagcagattttggcaggtgaatatgaccatctcccagaacaggccttctatatggtgggacccattgaagaagctgtggcaaaagctgataagctggctgaagagcattcatcgtgaggggtctttgtcctctgtactgtctctctccttgcccctaacccaaaaagcttcatttttctgtgtaggctgcacaagagccttgattgaagatatattctttctgaacagtatttaaggtttccaataaaatgtacacccctcaaaaaaaaaaaaaaaaaaaaaaaaaaaaaaaaaaaaaaaaaaaaaaaaaaaaaaaaaaaaaaaaaaaaaaaaaaaaaaaaaa

SEQ ID NO: 488 - DNA, 827 bp, Homo sapiens
  misc_feature (5): n equals a,t,g, or c
  misc_feature (826): n equals a,t,g, or c
gtacngattcccggtcgacccacgcgtccgacatggagctgttcctcgcgggccgccgggtgctggtcaccggggcaggcaaaggtatagggcgcggcacggtccaggcgctgcacgcgacgggcgcgcgggtggtggctgtgagccggactcaggcggatcttgacagccttgtccgcgagtgcccggggatagaacccgtgtgcgtggacctgggtgactgggaggccaccgagcgggcgctgggcagcgtgggccccgtggacctgctggtgaacaacgccgctgtcgcagattgtggccaggggcttaatagcccggggagtcccaggggccatcgtgaatgtctccagccagtgctcccagcgggcagtaactaaccatagcgtctactgctccaccaagggtgccctggacatgctgaccaaggtgatggccctagagctcgggccccacaagatccgagtgaatgcagtaaaccccacagtggtgatgacgtccatgggccaggccacctggagtgacccccacaaggccaagactatgctgaaccgaatcccacttggcaagtttgctgaggtagagcacgtggtgaacgccatcctctttctgctgagtgaccgaagtggcatgaccacgggttccactttgccggtggaagggggcttctgggcctgctgagctccctccacacacctcaagccccatgccgtgctcatcctacccccaatccctccaataaacctgattctgctgcccaaaaaaaaaaaaaaaaaaaaaaaaaaaaaaaaaaaaaaaaaaaaaaaaaaaaaaaaaaaaaaaaaana

SEQ ID NO: 489 - DNA, 1926 bp, Homo sapiens
aattcggcacgagccatcccggtgccggtcccggacggcagcagtctgctcaccaccgccctgccctccatggcggcggccgcggggcccctggacggcaaagtcgccgccctggccgccagcccggcctcggtggcagtggactcgggctctgaactcaacagccgctcctccacgctctcctccagctccatgtccttgtcgcccaaactctgcgcggagaaagaggcggccaccagcgaactgcagagcatccagcggttggttagcggcttggaagccaagccggacaggtcccgcagcgcgtccccgtagacccgtcccagacacgtcttttcattccagtccagttcaggctgccgtgcactttgtcggatataaaataaaccacgggcccgccatggsgttasccttccttttgcagttgcgtctgggaaggggccccggactccctcgagagaatgtgctagagacagcccctgtcttcttggcgtggtttatatgtccgggatctggatcagattctgggggctcagaaacgtcggttgcattgagctactgggggtaggagttccaacatttatgtccagagcaacttccagcaaggctggtctgggtctctgcccaccaggcggggaggtgttcaaagacatctccctcagtgcggatttatatatatatttttccttcactgtgtcaagtggaaacaaaaacaaaatctttcaaaaaaaaaatcsggacaagtgaacacattaacatgattctgtttgtgcagattaaaaactttatagggacttgcattatcggttctcaataaattactgagcagctttgtttggggagggaagtccctaccatccttgtttagtctatattaagaaaatctgtgtctttttaatattcttgtgatgttttcagagccgctgtaggtctcttcttgcatgtccacagtaatgtatttgtggtttttattttgaacgcttgcttttagagagaaaacaatatagccccctacccttttcccaatcctttgccctcaaatcagtgacccargggagggggggatttaaagggaaggagtgggcaaaacacataaaatgaatttattatatctaagctctgtagcaggattcatgtcgttctttgacagttctttctctttcctgtatatgcaataacaaggttttaaaaaaataataaagaagtgagactattagacaaagtatttatgtaattatttgataactcttgtaaataggtggaatatgaatgcttggaaaattaaactttaatttattgacattgtacatagctctgtgtaaatagaattgcaactgtcaggttttgtgttcttgttttcctttagttgggtttatttccaggtcacagaattgctgttaacactagaaaacacacttcctgcaccaacaccaataccctttcaaaagagttgtctgcaacatttttgttttcttttttaatgtccaaaagtgggggaaagtgctatttcctattttcaccaaaattggggaaggagtgccactttccagctccacttcaaattccttaaaatataactgagattgctgtggggagggrggagggcagaggctgcggtttgactttttaatttttcttttgttatttgtatttgctagtctctgatttcctcaaaacgaagtggaatttactactgttgtcagtatcggtgttttgaattggtgcctgcctatagagatatattcacagttcaaaagtcaggtgctgagagatggtttaaagacaaattcatgaaggtatattttgtgttatagttgttgatgrgttctttggttttctgtatttttccccctctctttaaaacatcactgaaatttcaataaatttttattgaaatgtcaaaaaaaaaaaaaaaagggcggccgc

SEQ ID NO: 490 - DNA, 1461 bp, Homo sapiens
  misc_feature (1432): n equals a,t,g, or c
  misc_feature (1452): n equals a,t,g, or c
ggacgacagaagggsagacgcagaggcggacaagatggcggcggcagctgtacagggcgggagaagcggtggtagcggaggctgtagtggggctggtggtgcttccaactgcgggacaggaagtggccgtagcggcttgttggataagtggaagatagatgataagcctgtaaaaattgacaagtgggatggatcagctgtgaaaaactctttggatgattctgccaaaaaggtacttctggaaaaatacaaatatgtggagaattttggtctaattgatggtcgcctcaccatctgtacaatctcctgtttctttgccatagtggctttgatttgggattatatgcacccctttccagagtccaaacccgttttggctttgtgtgtcatatcctattttgtgatgatggggattctgaccatttatacctcatataaggagaagagcatctttctcgtggcccacaggaaagatcctacaggaatggatcctgatgatatttggcagctgtcctccagtcttaaaaggtttgatgacaaatacaccttgaagctgaccttcatcagtgggagaacaaagcagcagcgggaagccgagttcacaaagtccattgctaagttttttgaccacagtgggacactggtcatggatgcatatgagcctgaaatatccaggctccatgacagtcttgccatagaaagaaaaataaagtagccaattctaaaagtagccctctttctcctggatcttgctgaattagtggcttggggggtgggggagataaaaagaacttaaaatgggtaaagtaagaaatgttaaaaagtccctgttttgtcctgaaattttagtctattctgggtaaataggattttctgacacagatatgagaagttgtagctctgatgtctagctgtagtctccttgatctgctgattgcattattttaatttgcttttctgggaaagcagttttgctaaaagctgtacagactttttcttttgtacctagcagtactttatatagtatagctttgggccatgtagcattttaagactcaattttaaaaaattattaatctgttgctgactcttaattcctatttcaatatgtgtttccttgaagaattcaggatacaacttcttgtgtatgacagctttccttcacacactatttttgtgggtgtgtatatatctgatttgggaagaatttaaaaaacacatagctttttaatttgtttgaaacagactttctgcctgttacatttttgcttttaaccaattaaagaagccaatggcattttagttttatattgtgttttccactagtatatccctgttgatttgtttgtgccttttattaactgccattttctaaaatttttttcaataaaaggaaggaagatgtgaaaaaaaaaaaaaaaaaaaaatgggnggccgaacttatccctaggngggtattta

SEQ ID NO: 491 - DNA, 805 bp, Homo sapiens
  misc_feature (20): n equals a,t,g, or c
tccaaagtgctgggattacngctgagccacgtgctcagccgcaaaattctttatgaattttacacttggcaaatgttaatgacggaagccatagtctgctcctaatacatgtccaaagcattgactgttgtgtcattagctgcctggttacattagctccctggcttcttgtttagaccactgctaatcccttaaaaacaagaggtctggcactagtagcacaacctaaggtggcattacagatctttgagcgagccacagcaacttttctgccaagtcagcttagtttagacttcagtgaatcaggctattgctatcctaatgtatgtctctatgagtgtatttagccacacatctgcccttggttgactttctgactcattgcttgcttgcttgtttccttgctttggaaaactattgaagattgctaaaaaataccactgcaaagtgatggaaaagggtggagaacaggggagtagccaggctggatggctcaaatataaatgaatgaggaattctttatgaagtatcagtcagattttatgattaagtgatgtaatataggaattatgtaaaagggaagaatgtctgatactgatctattagagaggtactttagaggcttcttgattggcataaagttcctaaggttatagattttccccccttttggctgtatagcaaagtgttttaatccacggttgtgccttattgttccattaaaattgtatcttcgatccatcaataaatacttgtggttgaaacaaaaaaaaaaaaaaaaaaaaaaaaaaaaaaaaaaaaaaaa

SEQ ID NO: 492 - DNA, 2269 bp, Homo sapiens
agaagaatagtctcaccccgcgtgtgccaaggtggagtatgcctacagcgacaacagcctggaccccgatgatgaggacagtgattaccaccaggaggcctacaaggagtcctacaaagaccggcggcggcgcgcacacactcaggctgagcagaagaggagggacgccatcaagagaggctatgatgaccttcagaccatcgtccccacttgccagcagcaggacttctccattggctcccaaaagctcagcaaagccatcgttctacaaaagaccattgactacattcagtttttgcacaaggagaagaaaaagcaggaggaggaggtgtccacgttacgcaaggatgtcaccgccctaaagatcatgaaagtgaactatgagcagattgtgaaggcacaccaggacaacccccatgaaggggaggaccaggtctctgaccaggtcaagttcaacgtgtttcaaggcatcatggattccctgttccagtccttcaatgcctccatctcagtggccagcttccaggagctgtcagcgtgtgtcttcagctggatcgaggagcactgtaagcctcagaccctgcgggagattgtgattggcgtcctgcaccaattgaaaaaccagctttactgaccggttcttggaaacctggagaacagccaacaagaggcccttgaatctctacgtggccactgaactgctgggcccgggagactggactacaacacctcacactggtcagctggtttctacttggtgtttggtttttcccagccccattttatcttcagcggagccgcggtgtttgttttgtgaaagcttctgattaatttattatattgacgataaaactcaaacctacccagccttccccccactccatggaagtccttgggatgggcgtctgctctggacaccccaaagagctcctgccctctcagccctttattcaagcctcagatttctgctcatgatctacatagatttggaaactgttttcctctgttttggtctcttgggcaacatttttggcccaagtttgggcaacatttggcccaagtttgggcattttggcagtagctgtatgggagaaaaagagtaagaggaaatattcccacagccatgaagggtgaaagggcaccttgtgcctagactagggctgcctggtcagtcccaggtgaggccaagggctttctggccatctcagggaggggccaccaggttcctcccctcaccccatattccatcaccttcctcctctgctctgggtggtaagggaagccctcccggttcccacaggctatgatgctgcatggcagaggcaggtataacacagcactacatattggaaattttttatttttctaaataccaatgcagttttgctacggttacaattttgaaatattaactgagcctcaaaatcaccctttctgtcaagcatatcttggcctctcccatgtctcagtgttgcctgcatttctcccaggacttgggggtggggtgaaaagcgtacaaaagatacttaaaagggctcctggggtacacaagcccagcaggtcctgagtgaagccgtgggccctccaaatgctcgttttatagcaacctctctctaccctagttctccaaattcacttctgccttcctcaggtttgatatctggcaggtttgactatccagaggaaattaaatatttttatataaaattaaattataataaatattgccaaatgctttcctttagcattgttccaagtctaaatgttaacctcaagctactgcaatttagacaatgaaatkggctgggtctacccccagccaccagccctcatcctctctacccagtgctctggtttatgcttgtctcctgactgctctgcttaaaggtgaaagtagcaggaacaacaacaaaagccaaccaaaaacaaggtagccagtgcaagacatctcactcttctgacatcctgcagtccccaccagtcctgaccgtgggccctcaggggtctgggagtgtgacgttgtaatcttcatccgtctctatcccaacttcctcctgtgagacagggagacaagtgaatgagatgtcaccaggataagaccacagggaagcaaagaaggaagagagctccacttacaaagaactgcttcttgctcttggggtatccttcaagtattgcatcagacagctctgtagcctgacaagaaataaaaccacccgttttcagatgggcagcacctggcactgcctgtcagtttatgatattgtgt

SEQ ID NO: 493 - DNA, 4108 bp, Homo sapiens
cacgagtactacaatatgttgtcccagaagtgaaagacctttacaattggcttgaagtagaatttaacccattaaaactctgtgagcgagtcacaaaggttctaaattgggttagggaacaacctgaaaaggaaccggaattgcagcagtatgtgccacaactgcaaaacaacaccatcctccgccttctgcagcaggtgtcacagatttatcagagcattgagttttctcgtttgacttctttggttccttttgttgatgctttccaactggaacgggccatagtagatgcagccaggcattgcgacttgcaggttcgtattgatcacacttctcggaccctgagttttggatctgatttgaattatgctactcgagaagatgctccgattggtcctcatttgcaaagcatgccttcagagcagataagaaaccagctgacagccatgtcctcagtacttgcaaaagcacttgaagtcattaaaccagctcatatactgcaagagaaagaagaacagcatcagttggctgtcactgcataccttaaaaattcacgaaaagagcaccagcggatcctggctcgccgccagacaattgaggagagaaaagagcgccttgagagtctgaatattcagcgtgagaaagaagaattggaacagagggaagctgaactccagaaagtgcggaaggctgaggaagagaggctgcgccaggaagcaaaggagagagagaaggagcgtatcttacaggaacatgaacaaatcaaaaagaaaactgtccgagagcgtttggagcagatcaagaaaacagaactgggtgccaaagcattcaaagatattgatattgaagaccttgaggaattggatccagattttatcatggctaaacaggttgaacaactggagaaagaaaagaaagaacttcaagaacgcctaaagaatcaagaaaagaagattgactattttgaaagagccaaacgtttggaagaaattcctttgataaagagcgcttacgaggaacagagaattaaagacatggatctgtgggagcaacaagaggaagaaagaattactacaatgcagctagaacgtgaaaaggctcttgaacataagaatcgaatgtcacgaatgcttgaagacagagatttattcgtaatgcgactcaaagctgcacggcagtctgtttatgaggaaaaacttaaacagtttgaagagcgattagcagaagaaaggcataatcgattggaagaacggaaaaggcagcgtaaagaagaacgcaggataacatactatagagaaaaagaagaggaggagcagagaagggcagaagaacaaatgctaaaagagcgggaagagagagagcgcgccgaacgagcaaaacgcgaggaagagctacgagagtatcaggagcgggtgaagaaattagaagaagtggaaaggaaaaaacgccaaagggagttggaaattgaagaacgagaacggcgtagagaggaagagagaagacttggcgatagttccctttctagaaaggactctcgttggggagatagagattcagaaggcacctggagaaaaggacctgaagcagattctgagtggagaagaggcccgccagagaaggagtggagacgtggagaagggcgagatgaggacaggtctcatagaagagatgaagagcggccccggcgtctgggggatgatgaagatagagagccctctcttagaccagacgatgatcgggttccccggcgtggcatggatgatgacagaggccctagacgtggtcctgaggaagataggttctctcgtcgtggggcagacgatgaccggccttcctggcgtaacacagatgatgacaggcctcccagacgaattgccgatgaagacaggggaaactggcgtcatgcggatgatgacagaccacctagacgaggactggatgaggacagaggaagctggcgaacagctgatgaggacagaggaccaagacgtgggatggatgatgaccgggggccgaggcgaggaggcgctgatgatgagcgatcatcctggcgtaatgctgatgatgaccggggtcccaggcgagggttggatgatgatcggggtcccaggcgaggcatggatgatgaccggggtcccaggcgaggcatggatgatgaccggggtcccaggcgaggcatggatgatgaccggggtcccaggcgagggttggatgatgatcgaggaccttggaggaacgccgatgatgacagaattcccaggcgtggtgcagaggatgacaggggcccttggagaaacatggatgatgatcgcctttcaagacgtgctgatgatgatcggtttcccagacggggtgatgactcaagacctggtccttggagaccattagtcaagccaggtggatggagagagaaagaaaaagccagagaggagagctggggtccacctcgagaatcaaggccatcagaagaacgtgaatgggacagagaaaaagaaagggacagagataatcaagatcgggaggagaatgacaaggaccctgagagagaaagggacagagagagagatgtggatcgagaggatcgcttcagaagacctagggatgaaggtggctggagaagaggaccagctgaggaatcttcaagctggagagactcaagtcgccgggacgatagggatagggatgaccgtcgccgtgagagggatgaccggcgtgatctaagagaaagacgagatctaagagacgacagggaccgaagaggacctccactcagatcagaacgtgaagaagtaagttcttggagacgtgctgatgacaggaaagatgaccgggtggaagagcgggaccctcctcgtcgagttcctcccccagctctttcaagagaccgagaaagagaccgagaccgagaaagagaaggtgaaaaagagaaggcctcatggagagctgagaaagatagggaatctctccgtcgtactaaaaatgagactgatgaagatggatggaccacagtacgacgttaagtctcaagataatggatttaaactggtgtcttaaataggtttgatcacattcaaggattattatacttgtgcttcaaccaatctaaattggattctttaatgttgtttcaccataacacaaaaagcatgaacttgtattaatcctatataatagattgatcatgcaccatatccacaggaggttggaaaaaccatgccattttctggaatttaagggtgttgcattatttcatcaatcatttgttgacaaaaaagaaaaactaaaaaataaatttaaaatgtgaaccttcaggtattgagtaacacctttatcttggtatagaactgatacttttttttgattttgaaatatctgataataatttggaatgaagtaaggttctgttaaaatatatttgaagaccctttaaagcagtgaatctgaaacaattttcacacccttaagtggttgatacgtacctattttaggtattttgaggtatttaccataaactaaatttagaaattttttagattcacttgaagtaaacattacaaacattggatacggtggggttttctttagattttacttgagagaaggtgagtacaaagcaatttgcagttgttgtaatgacaagattactgcgcaagtgtgaatccaaacagtatagcttttaaattttaaagcatttggtaaattatcgctgagtttttttctgttgccaatagcaaactgcttttccattaatggagaattcatgcctttcaagcattttaaatatgacaatatttataaatgtatggtttggaggaatcgtttaaattctctttcctaattttctttcttttgaagatagattctttcaacaagtaatttgtagtaatgactgtgttgacttcaattttggagcgcagtagctatgttaaagatgaactatttggtctcattgaagccaacacagaacttgctgctgtgttttttcttcagtgataaataaaatacttacagaatttgttttagtgttgatttgtggttatagtatttgtttaataatggtaagtttgccatattcagttggaggtttttttttacttgaatttttaat

SEQ ID NO: 494 - DNA, 2209 bp, Homo sapiens
  misc_feature (352): n equals a,t,g, or c
gcgggcattcaccccatgaacagcatcagcagcctggacaggactcgcatgatgacccccttcatgggcatcagccccctcccgggcggagagcgcttcccgtacccttctttccactgggaccccatccgggaccccttgagggatccttaccragaacttgacattcaccggagagacccgctgggcarggacttcctgctaaggaacgacccgytccaccggctctcgactycccggctgkacsaagccgaccgctccttcagggaccgggagcctcacgactacagccaccaccaccaccaccaccaccacccgctgtctgtggaccctcggcgggagcacgagcggngaggccacctggacgagcgggagcgcttgcacatgctcagagaagactacgagcacacgcggctccactccgtgcaccccgcctccctcgacggacacctcccccaccccagcctcatcaccccgggactccccagcatgcactatccccgcatcagccccaccgcgggcaaccagaacggactcctcaacaagacccctccgacagcagcgctgagcgcacctcccccgctcatctccacgctggggggccgcccggtctctcccagaaggacgactcctctgtccgcagagataagggagaggcccccttcccacacgctgaaggatatcgaggcccgataagccgagaacaggagcaagaacgaggaagaagaaaccctaggcagacaccaggccaggcttgagagacagaactcctgcatggctcacacagactgggggggaaagccccaccccttccccttgtaaaaaatgtatagactcagtgcacattttgaaatgttttgtatattatatgttgagatttttcagatcttttagcccagtcatatgttctcacgtctcctactttttgtttctcgtataaaactttttgatttgaaccaaaacagtgaagatgacaacacacaccaattggatgataattgtagcgggggcggtgggggggagaagtccacgccatccatcatgcaaaattctttcagatgaggtgggaaggccgtgtacatagttatgtaaaaagagattgcttcatgagctaatggttcatatatgcaaaagggtaagatgaaagctttactttgtacaaatgtaaatagataaagtaacataatacattaatacttcttaaaatgtgctatttgcaaacttacttaatatcagtgaacacagtcggctaaagctgtgttcccatatattgttatagacagctaaacccttcaactatgcaatgaatgttcgggcttttcacaaaagcccgcctaactcaaaggagccttttcaaatccatttacagcatacttaaggtcatattttccctgaacaagcgcttacgtgatatgactctgttttccttgcttgttttttttcaaacggagaaacatcctgttttgcaaattggaccccaggctggaacttagcatctgaagttgccgcttgtgggctctgggggaaagtgtagccccggagaggtaactgaggacatgagcaaccagtgccagggagggtgggatttgccagatgccaaaatcaggggacgggtggtggtgtctgtcagacacacacaggtcgccagtgacttcacacacacctcatgtgagaaccatgccttttttagtgtgtcctatttcatacctgtacacacttcctcgttttgtaatgagatttacttacacccaaacagatcctgaaagaaagcttcaagttttctcagatgatggatatgttttcactgtattcaataactgacggatgtaaggtgcacgtttcctgatgtgacgcactgtattccagctggtgatcaagtctgggaacagccgtaacaggtcaaccttgtggagccatcgcgagttagagggtgaaagatggcagaaaaaaaagtcttgtgtgtgagtgtgttttttgagtttgcatcaatcttaatgtctcttcataatacttttataatacattaagcctcttgtctacatatttggagagaatatgactttactagcagagaaatacaatatatcttgtctactggactgtaaaatatatgtatgaaataaaattagttccatttggtcttctagtatattaaagtgctatctgacgttgttatcctgtttttgcaaaaaaaaaaaaaaaaaaaatt

SEQ ID NO: 495 - DNA, 1677 bp, Homo sapiens
ggggtggagggactaaaggatgcccaaatgcgggatctcctgtccccgcccacagacaacaggccaggtcagatggacaatcggagcaagctccggaacatcgtggagctgcgcctggcaggcctggacatcacagatgcctccctgcggctcatcatccgccacatgcccctgctctccaagctccacctcagttactgtaaccacgtcaccgaccagtctatcaacctgctcactgctgttggcaccaccacccgagactccttaaccgagatcaacctgtctgactgcaataaggtcactgatcagtgcctgtccttcttcaaacgctgtggaaacatctgtcatattgacctgaggtactgcaagcaagtcaccaaggaaggctgtgagcagttcatagccgagatgtctgtgagtgtccagtttgggcaagtagaagaaaaactcctgcaaaaactgagttagtccaaggataagtatgtaaatacggggcgggctctgggaggggagagactttacaaaaatgagggcttttattttccatttggaacgtgggacaacagaccacaacgcaattccattttgcaagtctttccaagggagaagctgttcaaccacccgtttgggggatgagtgagccgacactttcctttggtctttctgaatcgtaactgcactgctttctggaccatttctaaggcggcctttacaagaagacattcctgtcggagaggagggtggacttcggagaaattctcatactgaagcatgagcttaggagtttctgttagtggtagtggtgttttggacacttcattccttgcaacaccgaggttttgggtgttgacataaagtggaccacacaccacatctgctgccgtcttgacacttttttttgtttggttggttttgttacatcttacattatgcagaactatttttgtacaaattgtttaaaagttatttatgcaaggtttgaatgcataccagtgtttttattgttttgagattgccaattttcctgatttccttaaggtaggagagaatttaacgtgtacttcatcgacacaacccatctacaaatgtgcccagatctaacaaagtaggctaagaccttccacttaaaagcatgtttaactggaagttgagagtctgctttgtacctcaagagttacatgagcatgttgtggataaatgtaaattatagtcaaagtaagatactctgccaagtttcctctgtagagaattcacttttctcaaattttaaaatttcgacttcagcctttgcactcaggaggttctgctccagcatgagctcttgtacttacatagatctaatttatacagtgagtcaagacgtagaataaatgctcccacatagcctttcttttgcttttgcttctctcctctgaagtgtgagttgagttctcatttaggtttgtaacatggctatttcctagttgtaaagttctgcatttataagtgccattgttgtaaggtggtgtttcctagaccttccctgatgcgattttacctttgttgaatttgtataaacaattgtacaaaaaaaaccactcttgaactttgagggtttctgttctaggagtggactagaagtttaagcccagagtcagtaaacactgttttgaagtccaaaaaaaaaaaaaaaaaaaa

SEQ ID NO: 496 - DNA, 1702 bp, Homo sapiens
  misc_feature (1691): n equals a,t,g, or c
  misc_feature (1701): n equals a,t,g, or c
cgagattccgggattggaatcaaaatgctaatttaaaaggtcaagtgaagctgctcctcacgttttggcgtgcctgcgctctctgcaggcagaagcgaacaaagacccagcaagagaaggcagaggctaagacccatcccgtatctgctctcctgaaataattctggagtcatgcctgaaatgccagaggacatggagcaggaggaagttaacatccctaataggagggttctggttactggtgccactgggcttcttggcagagctgtacacaaagaatttcagcagaataattggcatgcagttggctgtggtttcagaagagcaagaccaaaatttgaacaggttaatctgttggattctaatgcagttcatcacatcattcatgattttcagccccatgttatagtacattgtgcagcagagagaagaccagatgttgtagaaaatcagccagatgctgcctctcaacttaatgtggatgcttctgggaatttagcaaaggaagcagctgctgttggagcatttctcatctacattagctcagattatgtatttgatggaacaaatccaccttacagagaggaagacataccagctcccctaaatttgtatggcaaaacaaaattagatggagaaaaggctgtcctggagaacaatctaggagctgctgttttgaggattcctattctgtatggggaagttgaaaagctcgaagaaagtgctgtgactgttatgtttgataaagtgcagttcagcaacaagtcagcaaacatggatcactggcagcagaggttccccacacatgtcaaagatgtggccactgtgtgccggcagctagcagagaagagaatgctggatccatcaattaagggaacctttcactggtctggcaatgaacagatgactaagtatgaaatggcatgtgcaattgcagatgccttcaacctccccagcagtcacttaagacctattactgacagccctgtcctaggagcacaacgtccgagaaatgctcagcttgactgctccaaattggagaccttgggcattggccaacgaacaccatttcgaattggaatcaaagaatcactttggcctttcctcattgacaagagatggagacaaacggtctttcattagtttatttgtgttgggttcttttttttttttaaatgaaaagtatagtatgtggcactttttaaagaacaaaggaaatagttttgtatgagtactttaattgtgactcttaggatctttcaggtaaatgatgctcttgcactagtgaaattgtctaaagaaactaaagggcagtcatgcctgtttgcagtaatttttctttttatcattttgtttgtcctggctaaacttggagtttgagtatagtaaattatgatccttaaatatttgagagtcaggatgaagcagatctgctgtagacttttcagatgaaattgttcattctcgtaacctccatattttcaggatttttgaagctgttgaccttttcatgttgattattttaaattgtgtgaaatagtataaaaatcattggtgttcattatttgctttgcctgagctcagatcaaaatgtttgaagaaaggaactttatttttgcaagttacgtacagtttttatgcttgagatatttcaacatgttatgtatattggaaaaataaagttcctttcntcaaacattnt

SEQ ID NO: 497 - DNA, 2376 bp, Homo sapiens
  misc_feature (6): n equals a,t,g, or c
  misc_feature (2354): n equals a,t,g, or c
  misc_feature (2375): n equals a,t,g, or c
  misc_feature (2376): n equals a,t,g, or c
ggctcnaacatccttttgctgtgacgagctacgggaagaatctgtatttcacagactggaagatgaattccgtggttgctctcgatcttgcaatttccaaggagacggatgctttccaaccccacaagcagacccggctgtatggcatcaccacggccctgtctcagtgtccgcaagccataactactgctcagtgaacaatggcggctgcacccacctatgcttggccaccccagggagcaggacctgccgttgccctgacaacaccttgggagttgactgtatcgaacagaaatgaagacaagagtgccttatttcctttccaagtatttcacagcaacaywytacttgaagcaacttggtccagattgaaaagtgtcctctggctgagtggccactaggcccagacccagcccagcctgagccccaacaacttttccctcactgttccccaaaacatgcaccctggacttctctaatagaaaagtctccacccctacacaaggacagaaccctccacccctacccccaaccctcagacagacttatacacccctgagtgaggattacatgcccatcccagtgtcctaggaccttttcccaatactagccccccagtggtgaacagaacctcccaaatttgagttgcacccttccctgtggccttatgagctcagcctcgctttgaggtacccaccgtcctgtcagctccttgacctatgagccggggcctgactaggaaaagttgggagttaaggaggaaattagcattccttaatgttttgttttggtgctctgaatttcttctttattatagtcctatagttttactcctcagttcctcaccatcatcatcttgtctaagacccccattataatattcatgcgctgctttttcatcaaaacctaccctgtcctagagatctatgggcatttggtggatgataatgagcagcccctcccagatagaatgtcaatatttgagcagtaggatattggcatttgttagttaaaggcttaaatcaaaagaatgtccaatggtaggaatttcaaggtgtaggtcagatatttgagaataggggatttttttgatgtgccttaaattataccaaagattactaattattcctctttgcccaaaatacttgcatccaaggttctagtctctgttgctgtgctggtctttagccccactgctkgcactgatgtccctccttttcacggagacctatctgaggtacaggatggggctggcaccagatgatgtcccaccacagtccctcacctccggcctccacatgacagaaccaatttacactcaaccatgacctcacccctccttggtttctccctcgatctgtggccctttttggatgtattcttatctaacaacacaatccggaaagactgaattgaatatttatactaatggttcatatcctttattgctcaatgatctaattaaagggatcattgccacatttcatgtttatatttctacaatttgtttagaaaacatctcctgaccatatcagtagctcgtgttatctttttatcaactgcttcccagagtcctaaaacaatagaaattttggattgaaaagttcagcataaggagtttgagtcagtaaaggatgggataaaggagtcgagatgattcaatgaaaagtatcacaaaaaagagattgatcaacaagagaaataaaaaagcccaagaggaagtggtaggggaaggaatttaagaacagcaataagtaaaactcttaagtaactccaaaaagaaaatggtacattttgccaaagaccacttatacttgagaacatggaagaatttgcctgatactctctttggggaaaagagtctctcctcttttcctcaaaccccagtacactcagcctctctgccccaccttctcctgactttgtcctcacttgcttctgcagtacattggaacctgaattgaaagaaagtcttccttgaataattggagtttgtcttgagaggcaaatatagccccaagaatcacaagattcgaggaccatgtaggtcttttacgtagcccaaatccataaattagtctcactttttgtatttatcgtttcatattaaaccctctatatcaaatgttcatcatgattttgtatgatttttataactattttattcattttattagatttattctaaaattttttaatggtaaattcttaaactgtggaaaccactgaaggtgcttattaactgttctcccagatttgtacaagtattggatgattccttgagtttacagctgtacaaatagtgtggaaaataaactttttttaaaaaagaaaaaaaaaaaaaaaaaaaaaanaaaaaaaaaaaaaaaaaaaann

SEQ ID NO: 498 - DNA, 840 bp, Homo sapiens
  misc_feature (840): n equals a,t,g, or c
acgccgggatggggcggtcggarktcmcgggtcgacccacgcgtctcgcaggccgtagaggaagatggcggtggagtcgcgcgttacccaggaggaaattaagaaggagccagagaaaccgatcgaccgcgagaagacatgcccactgttgctacgggtcttcaccaccaataacggccgccaccaccgaatggacgagttctcccggggaaatgtaccgtccagcgagttgcagatctacacttggatggatgcaacyttgaaagaactgacaagcttagtaaaagaagtctacccagaagctagaaagaagggcactcacttcaattttgcaatcgtttttacagatgttaaaagacctggctatcgagttaaggagattggcagcaccatgtctggcagaaaggggactgatgattccatgaccctgcagtcgcagaagttccagataggagattacttggacatagcaattacccctccaaatcgggcaccacctccttcagggcgcatgagaccatattaaattctatttactatttgttgaatttatttttccgtcagttatgtaaaataaacatactcttcttcctcccctgattattgccattaagcctttaaattctaaacaaattataatgcatcatctatttaggagttagatttggatgtgctattgtatgattacgaatagtctgtatgtttcaagcccttctgtaaaatatgaagaaaagtgctcttagcattctgtgtaaaactgtactgttaaatatatgtgtgtaatcaaaaaaaaaaaaaaaaaaaaaaaaaaaaaaaaaaaaaaaaaaaaaaaaaaaaaan

SEQ ID NO: 499 - DNA, 461 bp, Homo sapiens
  misc_feature (452): n equals a,t,g, or c
  misc_feature (455): n equals a,t,g, or c
ggcacagcttccctcctcttcctttctccgccatcgtggtgtgttcttgactccgctgctcgccatgtcttctcacaagactttcaggattaagcgattcctggccaagaaacaaaagcaaaatcgtcccattccccagtggattcggatgaaaactggaaataaaatcaggtacaactccaaaaggagacattggagaagaaccaagctgggtctataaggaattgcacatgagatggcacacatatttatgctgtctgaaggtcacgatcatgttaccatatcaagctgaaaatgtcaccactatctggagatttcgacgtgttttcctctctgaatctgttatgaacacgttggttggctggattcagtaataaatatgtaaggcctttcytttttaaaaaaaaaaaaaaaacyyrrgggggggcccggttcccaatcccccctatttnaancccctt

SEQ ID NO: 500 - DNA, 2782 bp, Homo sapiens
  misc_feature (2620): n equals a,t,g, or c
  misc_feature (2641): n equals a,t,g, or c
  misc_feature (2643): n equals a,t,g, or c
  misc_feature (2712): n equals a,t,g, or c
  misc_feature (2742): n equals a,t,g, or c
  misc_feature (2759): n equals a,t,g, or c
  misc_feature (2779): n equals a,t,g, or c
ctcaaggttgcccaaactgatggtgtcaatgtggacatgcacttgaagcagattgagataaagaagttcaagtacggtattgaagagcatggtaaggtgaaaatgcgaggggggttgctgcgaacctacatcatcagtatcctcttcaagtctatctttgaggtggccttcttgctgatccagtggtacatctatggattcagcttgagtgctgtttacacttgcaaaagagatccctgcccacatcaggtggactgtttcctctctcgccccacggagaaaaccatcttcatcatcttcatgctggtggtgtccttggtgtccctggccttgaatatcattgaactcttctatgttttcttcaagggcgttaaggatcgggttaagggaaagagcgacccttaccatgcgaccagtggtgcgctgagccctgccaaagactgtgggtctcaaaaatatgcttatttcaatggctgctcctcaccaaccgctcccctctcgcctatgtctcctcctgggtacaagctggttactggcgacagaaacaattcttcttgccgcaattacaacaagcaagcaagtgagcaaaactgggctaattacagtgcagaacaaaatcgaatggggcaggcgggaagcaccatctctaactcccatgcacagccttttgatttccccgatgataaccagaattctaaaaaactagctgctggacatgaattacagccactagccattgtggaccagcgaccttcaagcagagccagcagtcgtgccagcagcagacctcggcctgatgacctggagatctagatacaggcttgaaagcatcaagattccactcaattgtggagaagaaaaaaggtgctgtagaaagtgcaccaggtgttaattttgatccggtggaggtggtactcaacagccttattcatgaggcttagaaaacacaaagacattagaatacctaggttcactgggggtgtatggggtagatgggtggagagggaggggataagagaggtgcatgttggtatttaaagtagtggattcaaagaacttagattataaataagagttccattaggtgatacatagataagggctttttctccccgcaaacacccctaagaatggttctgtgtatgtgaatgagcgggtggtaattgtggctaaatatttttgttttaccaagaaactgaaataattctggccaggaataaatacttcctgaacatcttaggtcttttcaacaagaaaaagacagaggattgtccttaagtccctgctaaaacattccattgttaaaatttgcactttgaaggtaagctttctaggcctgaccctccaggtgtcaatggacttgtgctactatatttttttattcttggtatcagtttaaaattcagacaaggcccacagaataagattttccatgcatttgcaaatacgtatattctttttccatccacttgcacaatatcattaccatcactttttcatcattcctcagctactactcacattcatttaatggtttctgtaaacatttttaagacagttgggatgtcacttaacattttttttttgagctaaagtcagggaatcaagccatgcttaatatttaacaatcacttatatgtgtgtcgaagagtttgttttgtttgtcatgtattggtacaagcagatacagtataaactcacaaacacagatttgaaaataatgcacatatggtgttcaaatttgaacctttctcatggatttttgtggtgtgggccaatatggtgtttacattatataattcctgctgtggcaagtaaagcacactttttttttctcctaaaatgtttttccctgtgtatcctattatggatactggttttgttaattatgattctttattttctctcctttttttaggatatagcagtaatgctattactgaaatgaatttcctttttctgaaatgtaatcattgatgcttgaatgatagaattttagtactgtaaacaggctttagtcattaatgtgagagacttagaaaaaatgcttagagtggactattaaatgtgcctaaatgaattttgcagtaactggtattcttgggttttcctacttaatacacagtaattcagaacttgtattctattatgagtttagcagtcttttggagtgaccagcaactttgatgtttgcactaagattttatttggaatgcaagagaggttgaaagaggattcagtagtacacatacaactaatttatttgaactatatgttgaagacatctaccagtttctccaaatgccttttttaaaactcatcacagaagattggtgaaaatgctgagtatgacacttttcttcttgcatgcatgtcagctacataaacagttttgtacaatgaaaattactaatttgtttgacattccatgttaaactacggtcatgttcagcttcattgcatgtaatgtagacctagtccatcagatcatgtgttctggagagtgttctttattcaataaagttttaatttagtataaacatagcttctatattccgtctcaaaaaaaaaaaaaaaaaaacgtgcttagttcagttcaagttgctcctttataatttgnttttggatgaaaaaagattgngncatttgtttaaagtcagaggattatctaaaagccagtttcccagtcaatttggatataattggtagtgngaatacttcttcaaggactattacttgggnggttggagaatttattntggaagaaggcaaatgcttnggg

SEQ ID NO: 501 - DNA, 1249 bp, Homo sapiens
  misc_feature (36): n equals a,t,g, or c
gcaaggagtccccaatgcaaagacacagcgctgcgnttggcacctccttcctcactccctcaaaattgttaagaaatgttagtggtgggtctgatctgactgcagccatcggtaaataaaagtttttgatcctgttgaacccgcctgagacggtgctgtgaggggaaagccttccgcacccacacaggaattctgctgaggtcccccctccttccggccaatggcagaagtgggggaaaatttttagaagaaaagcaaacatgtgagaccaatcattatcaaatacttttattttttggttgagtatttatctttttattttttatttttttttttgaaagaatgtcttggaatgcgcaagtctccctttagagccgtcttttgcagggagcgggaagtgacaagagctcagatctccctcccgatctccctccccacctccgaagtctcctccgtggaccacaggtggatctttgtgcgaacaacttgcatttcggaagccactgtccgtctttaaacagaaagtcgaaggagccacgaagcaagcggccgtccgggcgtccgyctgccgtccccttccatgttcctcctcttccttcgcttcagcctcttctgttatgttttgtcttgaattttatttagactttttcagtgggtatttttctgtcttccaacctctactgtaaactttctggtccgagaacgagccgaacacagcgcgacgcagggactaggacggcccggtgaccgcgcggattcaggattgcggggacgcagaaaggttaaggcacttttaaaaactatagcaaggctcctgtttatttattctactttctttccctaataatcaaaacaccgcgtaggctcctccgtttatcagtattaatggtgtaactttgttggcaatatttgccgtgtagaattttttttagatatccattgtaaatttgaaacaaagaccgatctgtgtaaaaacaaatttccatatgttttatataaatatatatataatatgaaggactaccctcctttttttttttgtattttggctgctagagtgcagcatttgtgacacgtatttgaaatttgaaatttccttctgcactgtataaaaggaccatttgaggatgttttgccttttgtgtattttttcctaaaaaaagaacaaaaataaaaatgtataacatttgtacatggcctttaaaattgtatcaactagaaataaaattgcatgagtattttaaaaaaa

SEQ ID NO: 502 - DNA, 1358 bp, Homo sapiens
  misc_feature (1334): n equals a,t,g, or c
  misc_feature (1347): n equals a,t,g, or c
  misc_feature (1349): n equals a,t,g, or c
  misc_feature (1351): n equals a,t,g, or c
cccgcaccctagccaggccccagggagcctccgctgggcccagacagcagcgttyggttttatccacttttctyggataatcaggaggtgccccagtsgtcacagtgtggcattccgagttggggcgggtggtcgggtcaagatagcagcagcaggtgtcagggctcaagacaccaccccctccagcttctggggcccaggagcctctccctgctacagggggtgggggtcctgctcagcagggtaggtggtggttttaggtcttgtcaccctcactcagtggaactgcctctgggagctttggcgtctgtractaaagggacgctggattgctcaggtcagctgctcggggctcccaggctgggtgtgccttagccacaggcagggctgtcaataacccccttcctcactggccaccacctgacatcagcaccagtgacaggctggtcagagggcggggctggtgagggtttgtcctaagaggaccaccgccatctctgggtctccagggggagagcctggccctgtcctttgctacccagggctgcccccaggcccatgaagccaataggagagcgtgtggcactggcccacaaactgtccctgtcctgtcttcctcccgagccatggcctctgctagctccaccttgaaggagccccccacatcctcccctacatcccagagatgccaccacttgtgtctccacaatgtgctcctgcccacccgggttccgcactgtccgacccctgcacaccactcatgtcaccacggcgtgcatcatgttcatccccatctatttatttaagcctttctttgcttgtagggcattttgtatgtagagcagttgaaaacagaacctcagaacttaacatctgtcctgatgttaaagtgcttttcatgaccaccctgttatctatgtatatgtaaagttaaggatgagatcttaagtttacaattaaaaactcagtactcaatatttaatattctactcgagctttatggaagccaaatcatgtgcatgtgtgtgtgtgcgtgtgtgcaagctttgaacctccttccacagccgcatcttctcatgacacaaagcttttgataagtactttcctgtgggtcgctcagggcctcatagcatctcattcaattacaagaatagaggccagacacggtggcgcatgcctggtagtcccagctaaactggggaggctggagggcagggagggatcactttggagcccagggagattggagggctggcagtggagccatggatccggcggacactggcacttccagcctgggggtggacgggtggagacttttgttctccaaaaanaaaaaaaaaaaancntnggagggc

SEQ ID NO: 503 - DNA, 501 bp, Homo sapiens
  misc_feature (457): n equals a,t,g, or c
  misc_feature (492): n equals a,t,g, or c
gcccacgcgtccgacggctgcgagaagacgacagaaggggctttctttctttccgcgccgatagcgctcacgcaagcatggttaacgtccctaaaacccgccggactttctgtaagaagtgtggcaagcaccaaccccataaagtgacacagtacaagaagggcaaggattctctgtacgcccagggaaagcggcgttatgacaggaagcagagtggctatggtgggcaaactaagccgattttccggaaaaaggctaaaactacaaagaagattgtgctaaggcttgagtgcgttgagcccaactgcagatctaagagaatgctggctattaaaagatgcaagcattttgaactgggaggagataagaagagaaagggccaagtgatccagttctaagtgtcatcttttattatgaagacaataaaatcttgagtttatgttcaaaaaaaaaaaanggggggggcccggtacccawtcgcctatagggggncgtttaaaa

SEQ ID NO: 504 - DNA, 2011 bp, Homo sapiens
  misc_feature (1941): n equals a,t,g, or c
  misc_feature (1961): n equals a,t,g, or c
  misc_feature (1974): n equals a,t,g, or c
  misc_feature (1976): n equals a,t,g, or c
  misc_feature (2002): n equals a,t,g, or c
gatctgccttcccagttagactgagagaacaggggatatacctaaataataataataataataataataataataataataaataataatggagagctccttgaagatagggagcctgtaagaatcattgagggcttattttgtataccaactgctaaactagatgcttcatacattgttgtcaatactcatgacagccttgtaaagtagaaawtaattcttccagttaacackaaggctgacatatgaataccttggcaaatctggaaagctgggaagacagtaattgaactcaagacttcttgtcaccaagggcatgcacttgtactctgccatgtggsccttttttacctcctgtggattctccctacctggtacttggccttaggtgtacacacacctggcactttgcttgacacataataggtggaccacaaatatctactaaatgaatatttgcatatagtaatattttaaggtactaaaagcagctcaaagtaaatattaatatattaattccattgctatctggataaccactcaactttcctgctgaaaatgcccatttaattaaagaaggttggatagagctctctatatgcattttggacaggcaggggtttcaggtcataaacattctgatgagttaatataaaataagagaaactgtaaatttccactactaaaaatcacaaaaataacagaaacaaaagaagagataagaatttggggaattgtgctgaacaatttagtggttaaaaaaaacaactgtgcatgtttagacttaaataagcccccatccaagtgtgaggggtccagtaatttttcaaaacatatgaaagtgttaatacatttygacaaaggaccattaaaaaagtcctgaattctgacttgagggaggaaagtaatgactaatacattctctagagacttgcagactttgggaattcataaaggaatggatgataattattaactgttgctggctgattgcccagacagttctcaacagccctgtacaagtctctgggtttgggatggatcaattctgagactggaaaatggccaaatctttgcaaatgagaaatatttttcttataagttcttattgtaggcaaataattacatagattattcatcagagaatttttaaatgctcataatctcaactctttcatttacaacttgtatttccaatagtttatgggtcatctctgcatagatgtcagaagtcacctcaagtttagygtgtccaaaatctaactcacaggtctgtttctgacctcccaacttgctttccttgtgtttttcctatgctaatgatccaccataatcaaaataattaacatttatccagtgcctactatgtactattccctgtcctgttttacatttactcatttaaagtccataagaaacattaaatctcatctgccttctgaagaagatacaaccatgctctcttttacaaagtaggaaactgggtcacagaaaggtgaagtctttaaggctgaatcacagtagctcatcctagtaaatagaaaagccaggattcaactccaggggctgggtgcagaactgctattcttcactgcttcaccaatcagcagctacccaaggcagaaaactttttcatccttggctccttcattctccctgtcaccccagatcccctctacatctagtcagagaataggtcctgtcaattccaacttctctatatggctcctctcaggcatgtgcccttaattggcctaattctctaatacaccttccctctacatgctcactccctcagatcattgctttatcacgkrttacctgggttgctattacataaagagcaatctttctaaaatgagggatcttatcacttcacttccacactaaaatgtttttcctgggggaaccacacttccttagcaatctgacccatcaganctttccaggctgtctcctgnctggttccctaangntcccagccaacaccggaattatcatngggcccaaa

SEQ ID NO: 505 - DNA, 1989 bp, Homo sapiens
  misc_feature (1917): n equals a,t,g, or c
ggtgaggggtcgcccgtgcacagcctgtcccagccgtcctgtcctggctgctcgctctgcttcgctgcgccgccactatgctctccctccgtgtcccgctcgcgcccatcacggacccgcagcagctgcagctctcgccgctgaaggggctcagcttggtcgacaaggagaacacgccgccggccctgagcgggacccgcgtcctggccagcaagaccgcgaggaggatcttccaggagcccacggagccgaaaactaaagcagctgcccccggcgtggaggatgagccgctgctgagagaaaacccccgccgctttgtcatcttccccatcgagtaccatgatatctggcagatgtataagaaggcagaggcttccttttggaccgccgaggaggtggacctctccaaggacattcagcactgggaatccctgaaacccgaggagagatattttatatcccatgttctggctttctttgcagcaagcgatggcatagtaaatgaaaacttggtggagcgatttagccaagaagttcagattacagaagcccgctgtttctatggcttccaaattgccatggaaaacatacattctgaaatgtatagtcttcttattgacacttacataaaagatcccaaagaaagggaatttctcttcaatgccattgaaacgatgccttgtgtcaagaagaaggcagactgggccttgcgctggattggggacaaagaggctacctatggtgaacgtgttgtagcctttgctgcagtggaaggcattttcttttccggttcttttgcgtcgatattctggctcaagaaacgaggactgatgcctggcctcacattttctaatgaacttattagcagagatgagggtttacactgtgattttgcttgcctgatgttcaaacacctggtacacaaaccatcggaggagagagtaagagaaataattatcaatgctgttcggatagaacaggagttcctcactgaggccttgcctgtgaagctcattgggatgaattgcactctaatgaagcaatacattgagtttgtggcagacagacttatgctggaactgggttttagcaaggttttcagagtagagaacccatttgactttatggagaatatttcactggaaggaaagactaacttctttgagaagagagtaggcgagtatcagaggatgggagtgatgtcaagtccaacagagaattcttttaccttggatgctgacttctaaatgaactgaagatgtgcccttacttggctgattttttttttccatctcataagaaaaatcagctgaagtgttaccaactagccacaccatgaattgtccgtaatgttcattaacagcatctttaaaactgtgtagctacctcacaaccagtcctgtctgtttatagtgctggtagtatcaccttttgccagaaggcctggctggctgtgacttaccatagcagtgacaatggcagtcttggctttaaagtgaggggtgaccctttagtgagcttagcacagcgggattaaacagtcctttaaccagcacagccagttaaaagatgcagcctcactgcttcaacgcagattttaatgtttacttaaatataaacctggcactttacaaacaaataaacattgtttgtactcacaaggcgataatagcttgatttatttggtttctacaccaaatacattctcctgaccactaatgggagccaattcacaattcactaagtgactaaagtaagttaaacttgtgtagactaagcatgtaatttttaagttttattttaatgaattaaaatatttgttaaccaactttaaagtcagtcctgtgtatacctagatattagtcagttggtgccagatagaagacaggttgtgtttttatcctgtggcttgtgtantgtcctgggattctctgcccccyctgagtaragtgttgtgggrtaaaggaatctytcaggggcagggggctt

SEQ ID NO: 506 - DNA, 1085 bp, Homo sapiens
gggcgtggcggcgctgtgcgcgtgcacaaaagagagctgaggggcgggggcgctgcggcacagctggtttgagcaactgaactggaaacaagatgcaggaccccaacgcagacactgaatggaatgacatcttacgcaaaaagggtatcttaccccccaaggaaagtctgaaagaattggaagaggaggcagaagaggagcagcgcatcctccagcagtcagtggtgaaaacatatgaagatatgactttggaagagctggaggatcatgaagacgagtttaatgaggaggatgaacgtgctattgaaatgtacagacggcggagactggctgagtggaaagcaactaaactgaagaataaattyggagaagttttggagatctcagggaaggattatgttcaagaagttaccaaagctggcgagggcttgtgggtcatcttgcacctttacaaacaaggaattcccctctgtgccctgataaatcagcacctcagtggacttgccaggaagtttcctgatgtcaaatttatcaaagccatttcaacaacctgcatacccaattatcctgataggaatctgcccacgatatttgtttacctggaaggagatatcaaggctcagtttattggtcctctggtgtttggcggcatgaacctgacaagagatgagttggaatggaaactgtctgaatctggagcaattatgacagacctggaggaaaaccctaagaagccgattgaagacgtgttgctgtcctcagtgcggcgctctgtcctcatgaagagggacagcgattccgagggtgactgaggctacagcttctatcacatgccgaactttcttgtgacaaattgtctggattttttaaaaaaggaaaaagcaagaatgaatccttgtggtttttagttttgtataaattatgtttcaaatctttacattttggaaataatcattgctggagattctgttaaatattttggaactcttttttttttaaattatagtatttcctctaaaaaaaattaaaaccagccatttgtatggcaaaaaaaaaaaaaaaaaaaaaaaaaaaaaaaaaaaaaa

SEQ ID NO: 507 - DNA, 1485 bp, Homo sapiens
  misc_feature (570): n equals a,t,g, or c
  misc_feature (1475): n equals a,t,g, or c
  misc_feature (1476): n equals a,t,g, or c
  misc_feature (1485): n equals a,t,g, or c
cgccgcccgtgcctttcctcttcctcctyctcctccttggcatccgcctcttcttcctcctgcgtcctcccccgctgcctccgctgctcccgacgcggagcccggagcccgcgccgagcccctggcctcgcggtgccatgctgccccggcggcggcgctgaaggatggcgacgccgctgcctccgccctccccgcggcacctgcggctgctgcggctgctgctctccggcctcgtcctcggcgccgccctgcgtggagccgccgccggccacccggatgtagccgcctgtcccgggagcctggactgtgccctgaagaggcgggcaaggtgtcctcctggtgcacatgcctgtgggccctgccttcagcccttccaggaggaccagcaagggctctgtgtgcccaggatgcgccggcctccaggcgggggccggccccagcccagactggaagatgagattgacttcctggcccaggagcttgcccggaaggagtctggacactcaactccgcccctacccaaggaccgacagcggctcccggagcctgccaccctgggcttctcggcangggggcaggggctggakctgggcctcccctccactccaggaacccccacgcccacgccccacacctccctgggctcccctgtgtcatccgacccggtgcacatgtcgcccctggagccccggggagggcaaggcgacggcctcgcccttgtgctgatcctggcgttctgtgtggccggtgcagccgccctctccgtagcctccctctgctggtgcaggctgcagcgtgagatccgcctgactcagaaggccgactacgccactgcgaaggcccctggctcacctgcagctccccggatctcgcctggggaccagcggctggcacagagcgcggagatgtaccactaccagcaccaacggcaacagatgctgtgcctggagcggcataaagagccacccaaggagctggacacggcctcctcggatgaggagaatgaggacggagacttcacggtgtacgagtgcccgggcctggccccgaccggggaaatggaggtgcgcaaccctctgttcgaccacgccgcactgtccgcgcccctgccggcccccagctcaccgcctgcactgccatgacctggaggcagacagacgcccacctgctccccgacctcgaggcccccggggaggggcagggcctggagcttcccactaaaaacatgttttgatgctgtgtgcttttggctgggcctygggctccaggccctgggaccccttgccagggagacccccgaacctttgtgccaggacacctcctggtcccctgcacctctcctgttyggtttagacccccaaactggagggggcatggagaaccgtagagcgcaggaacgggtgggtaattctagagacaaaagccaattaaagtccatttcagacctgcggaaaaaaaaaaaaaaaaaaaaaacnnggggggggn

SEQ ID NO: 508 - DNA, 1930 bp, Homo sapiens
  misc_feature (30): n equals a,t,g, or c
attttagtaaacttttagacaaaatttgtnaaaatgctgacatcatttataatccttcatttatttgtaaaaagatgaggacacacattaartgawgtcagcattttagtaaacttttagacaaaatttgttagggtcattcatgaaaactttaatactaaaagcactttccattatatactttttaaaggtctagataattttgaaccaatttattattgtgtactgaggagaaataatgtatagtagaggacagccttggtttgtaaagctcagttccactagttcatggttttgtgcaacttctgagcctcagttttctcctttgcaaattaataattacatacctttatagattttgaaattaatttaaatattagtatttggtacatgaaggcttaatgttaagtttcctttaatgatccacaataatccctttgatcacgttaatctaaatctagatgtctttgtctaattttttttgaatagcagttataaatgtaaaggactcaaagtttaagtaaaaagtgatactccaccttgtgtttcaaagaatttagttccacctcttcataccagtttaacacttaatatatttcattggattttagacagggcaaaaggaagaacaggggcctctggaggcccttggttatttaaatcttggattatttgtgatagtaatcacaaatttttggctaatttttaacctgaggttttgttttttttttaaaggaaatgcagcctagtcttgagaacataattttatataatcaattactaaatgttaaactattaccacacagcccataaaacagcatttgcgtttattgagagagaggatgtgccatcatgattaatgaaaactatcttttgagtttgaaaagaaattaatttgcagtgtttggattgtatatatggtgctaaaaataaattaatttactttataaaccttatctgtacattatacgatgtgatgaaatttgctttttatccaaatattttgtatcttgtaaatatggctaattataggaatgcctataatacatcttagattccttatatctaataagagttcaaagagttatgagttgaagtcttgaatgcaggaaactatctgatagtgttctaaaatttggttacttgggtttggatacccttagtgggatgatgtaaatagaggctagctacctaggcttgtctatagcaaccataatgttgatgtaagtaatgcggttactgaatcataagaaaatgccatctctttttagttgaaggaaaactctggaagtaggtgccattggtcattctgcagtgcactgcaaccattgtttcccctagtgccctcttttccctagggcattgctctcctattcccacgccttaacacagctctatacctagaagcagccagcccaggcatgcagtcacatttaatcacatcccccttctagagtgcttcaaaatgatgtagtccctcaacttggctaaagaatctcaatctcttgaaatttatttttttaatgtcatattcatctggtaaatatctactgtttgccaggcatttaagaatatggcaaagaacataaaagatggtgtcaccagattttggtcaccaatgagtacccgacccgttgccatgattaagagagaatgctttctattggagtttcaggaaatataatttgagaatactttaaagggaagtggaagtataagtgaatgatatttttcttttacatgtaaacaatgaagttatttcaaagttaagttttaaacaaaatacatgaagtagtgtctgccatacatgttaatattctacattcttgcttccttaaattaatatgtttgtgtgtatatatgtgcctcacacctgaattgaaaattaaagactggtttaaaagtgaaaaaaaaaaaaaaaaaaaaaaat

SEQ ID NO: 509 - DNA, 1134 bp, Homo sapiens
  misc_feature (895): n equals a,t,g, or c
  misc_feature (1041): n equals a,t,g, or c
  misc_feature (1064): n equals a,t,g, or c
  misc_feature (1090): n equals a,t,g, or c
  misc_feature (1106): n equals a,t,g, or c
gagccacgcccgggctgtgggaataagatggcggggaagaagaatgttctgtcgtctctcgcagtttacgcggaagattcagagcccgagtctgatggcgaggctggaatcgaggcggtgggcagcgcggctgaggagaaaggcggattggtatctgatgcctatggggaggatgacttttctcgtctagggggtgatgaagatggttatgaagaagaagaagatgagaacagtagacagtcggaagatgacgattcagagactgaaaaacctgaggctgatgacccaaaggataatacagaagcagaaaagcgagacccccaggaactcgtggcctccttttctgaaagagttcggaacatgtcgcctgatgaaatcaagatcccgccagaaccccctggcagatgttcaaatcacttgcaagacaagatccagaagctttatgaacgaaagataaaggagggaatggatatgaactacattatccaaaggaagaaagaatttcggaaccctagcatctacgagaagctgatccagttctgtgccattgacgagcttggcaccaactacccaaaggatatgtttgatccccatggctggtctgaggactcctactatgaggcattagccaaggcccagaaaattgagatggacaaattggaaaaggccaaaaaggagcgaacaaaaattgagtttgtgacgggcaccaaaaaaggcaccacgaccaacgccacgtccaccaccactaccactgccagcacagctgttgcagatgctcagaagagaaagagcaagtgggattcggctatcccagtgacaacgattagcccagcccaccatcctcaccaccacagccaccctgccagctgttgtcacggtcaccaccagcgccagncktccaaggaccaccgtcatctctgctgtggggcaccattgtgaagaaggccaagcagtgacctgaggggccaccttagggayttgaaaagggaccgttgcagccccarttgaccactggccagtgggagggcggccatttttgtnttatttttcagggatttggggancttatttccccaggttgcccaacttnaggagggagttttttntttttgggcttttccaggttgggaaggg

SEQ ID NO: 510 - DNA, 1382 bp, Homo sapiens
ggcgaatggggaaggatttgaagtcacctttgggtgtttggagtgatcagagctgtctgccctcttggggagtgacagtgccccactctgttaagtcccatgcctgcccccaactcagcttcagccacaatgatgtagcctcttttcctttccatccacagggcacctggcctgggtggagcccactcctcagcacccacctcacttcttgcagtattctgcagaccccagccctgtgcctgtgctcctggacagctggagataaggagtgggccctggaagatgctcattcaggccctgctcaagattccagtcctgattgctggactcgctgaagaragactacgcaggaaagccccagccacccatcaaatcagagagaaggaatccaccttcttacgctatggcaggtaagaaagtactcattgtctatgcacaccaggaacccaagtctttcaacggatccttgaagaatgtggctgtagatgaactgagcaggcagggctgcaccgtcacagtgtctgatttgtatgccatgaactttgagccgagggccacagacaaagatatcactggtactctttctaatcctgaggttttcaattatggagtggaaacccacgaagcctacaagcaaaggtctctggctagcgacatcactgatgagcagaaaaaggttcgggaggctgacctagtgatatttcagttcccgctgtactggttcagcgtgccggccatcctgaagggctggatggatagggtgctgtgccagggctttgcctttgacatcccaggattctacgattccggtttgctccagggtaaactagcgctcctttccgtaaccacgggaggcacggccgagatgtacacgaagacaggagtcaatggagattctcgatacttcctgtggccactccagcatggcacattacacttctgtggatttaaagtccttgcccctcagatcagctttgctcctgaaattgcatccgaagaagaaagaaaggggatggtggctgcgtggtcccagaggctgcagaccatctggaaggaagagcccatcccctgcacagcccactggcacttcgggcaataactctgtggcacgtgggcatcacgtaagcagcacactaggaggcccaggcgcaggcaaagagaagatggtgctgtcatgaaataaaattacaacatagctacctggggatacttttttctttctgttttttgtttgtttttaattttagctttaaggagcacatggccagtactgtttcaggggaatattgggtggcgctggggtttgggcttctattgatcccatcacccaaacagtgagcatagttcccaatagatagtttttcaacacttcctttcctccc

SEQ ID NO: 511 - DNA, 1741 bp, Homo sapiens
  misc_feature (1696): n equals a,t,g, or c
  misc_feature (1710): n equals a,t,g, or c
  misc_feature (1715): n equals a,t,g, or c
  misc_feature (1717): n equals a,t,g, or c
  misc_feature (1720): n equals a,t,g, or c
aactatccaagccacctattttatttgttctttcatctgtgactgcttgctgactttatcataattttcttcaaacaaaaaaatgtatagaaaaatcatgtctgtgasttcatttttaaatgtacttgctcagctcaactgcatttcagttgtattatagtccagttcttatcaacattaaaacctatagcaatcatttcaaatctattctgcaaattgtataagaataaagttagaattaacaattttattttgtacaacagtggaattttctgtcatggataatgtgcttgagtccctataatctatagacatgtgatagcaaaagaaacaaacaaaagccaggaaaacactcattttcgccttgaatatgtaaatgggattaattttgtcctgtgccttatgtggaaaggaacttctttggttttccttttttgttctggtggaagcatgtgcaggagacatatcatccaaacataaaccattaaaatgtttgtggtttgcttggctgtaattttcaaagtagttaattgaggacaaagggtaatgcagaagtgatagctttggtttgctgagtcttgttttaagtggccttgatatttaaaactattcctgccaccatttcttctccttggccacttcttccttgcgtctccctgcatgctgctttatttgcttctccctccccaaccacctcatggtatatttaagagtgaaagggacaaactagtaggtttgtcaagtttaatataaagcactgatgtaacttgctaggtaaacggaaagataagttctaactgcctactatccmatgtccagttaattggtgtcttcccccctcatttgctctcttccctaaaatgtgtcccagatgccttcatttgctgttttacttctatgttctgcttttcctcctctcttkgttcccttcckgtctatccattgagtttatgaaatggaagagttaactgcatgcactagtgtttgragggtgttgtggtttgtctttctaattaggtgtatagcctattcacttcctagaataaatctcttamcctaaatttgagtagtctgcattttggcaactcctctagcagcttggtagcctagtacaggttgtttttttaaaaaaggaaaagcaggaaggaggagtgaattttattaacatgtttgccaaatgtattgagatttggcctctgaagaacactttttcagtgttaagtttctttaccttaagattcagaaatactttagaatattattaattttaagtcctgtctttacatccttttggaaaacttgtattaccatgagtttggaaaaaggacaacgaaaggcttttcatgtaaagataagatctttagctatctctaaccctgtccttttttcactgcattttttctagttttgcttcattgcttatcattaggatagggtaagtgaagtttgctatgctgctagcatcctaagatgatacctttgttgaaagaattgtgaatagcatgattcatttctagcagaggctgagtttaggacagcagcttccattgagaagtctttctgtgtcgtgaatagcattttaatgacctcttggctcacataagcaaacaacatagggacgtatctgctatgaaaatccacaaatttttcagatagtgccctaaaaacaattttatatgcctcactggttgttagngcttaggttattancacananggngttattccgtttaccgccccc

SEQ ID NO: 512 - DNA, 1530 bp, Homo sapiens
  misc_feature (1342): n equals a,t,g, or c
  misc_feature (1444): n equals a,t,g, or c
  misc_feature (1488): n equals a,t,g, or c
  misc_feature (1508): n equals a,t,g, or c
gaagcggcgtcggcggctggagcagaggcagcagccggacgagcagcggaggcggtcgggagcgatggtgaagatggcggcggcgggcggcggaggcggcggtggccgctactacggcggcggcagtgagggcggccgggcccctaagcggctcaagactgacaacgccggcgaccagcacggaggcggcggcggtggcggtggaggagccggggcggcgggcggcggcggcggtggggagaactacgatgacccgcacaaaacccctgcctccccagttgtccacatcaggggcctgattgacggtgtggtggaagcagaccttgtggaggccttgcaggagtttggacccatcagctatgtggtggtaatgcctaaaaagagacaagcactggtggagtttgaagatgtgttgggggcttgcaacgcagtgaactacgcagccgacaaccaaatatacattgctggtcacccagcttttgtcaactactctaccagccagaagatctcccgccctggggactcggatgactcccggagcgtgaacagtgtgcttctctttaccatcctgaaccccatttattcgatcaccacggatgttctttacactatctgtaatccttgtggccctgtccagagaattgtcattttcaggaagaatggagttcaggcgatggtggaatttgactcagttcaaagtgcccagcgggccaaggcctctctcaatggggctgatatctattctggctgttgcactctgaagatcgaatacgcaaagcctacacgcttgaatgtgttcaagaatgatcaggatacttgggactacacaaaccccaatctcagtggacaaggtaatcttgacgaccactttgttctaaacatacccgccttgctttcactcgactagtgcacttaataggcctgggctcagggttatgtaatgccattgggccccccatggacatgggagggccttggggtcagcacttggacaccctagtgggatgggggagtgagaggcctccatgggtcttcactgctgcttggggccctccgatgctgctcaggatacagaggcaaggcagaagcctgagatgggcggggagcagggcctcactgaggatgaggcgtgggggcggccttagaaaccagcagtggctcctttgagagtctggtgagggtcactcactccattcttgctggaccaggaattgtcctcttgttctgcgctgttgagagggtctgatttgggggagtgacagtgttggggggcgatgaggctcctgggctcttgcagtgagcctttgtgagcaagctgacccttgtggaggtgagaacactntggaatggaccaaggcggacatgctttaaaataatttgtagaggggaacgcaacatcttttgcaaggtgggcccaaatgggacaacttcctttcctaagggnctggcaagaaatgggttttggccttttgggtaagcaaggggaanaaggttgggaaggaattggncctaatgaagaaaacaagcggg

SEQ ID NO: 513 - DNA, 2999 bp, Homo sapiens
  misc_feature (243): n equals a,t,g, or c
  misc_feature (2606): n equals a,t,g, or c
  misc_feature (2996): n equals a,t,g, or c
tttttttttattttttggtttagcatttaataggcacataatcaacatttactgttcaattgaaacaaaattaaaattgggcgctgtctctatctttatttgtgatcggccctaactgcactggcaatcttttccgtttttttgttttctgttttccattcgcatgccccttagcgtacctggggctccggctcctttacaaatgaaacccaaagtgctccgaagcacagccagcgaaagganaaactctgaaacggacaagatggctgccacctcttcgcgcctcttagtcccacccactcagggcggaggtctgcgtcatgtgaccctccccttcttggctccgctcctaccgcagtgcttgacgggaggcggacggggaacgaggccgtcggcattttgtgtctgcttcctgtgggacgtggtggtagccgttgggttgggaaagtgagggatttttggcctcgtttctcctgcttcttttctcctcccttttactttgccggtagaacacagttatgggtcgcaagaagaagaagcagctgaagccgtggtgctggtattgtaatagagattttgatgatgagaagatccttattcagcaccaaaaagcaaagcattttaaatgccatatatgtcacaagaaattgtatacaggacctggcttagctattcattgcatgcaggtacataaagaaacaatagatgccgtaccaaatgcaatacctggaagaacagacatagagttggaaatatatggtatggaaggtattccagaaaaagacatggatgaaagacgacgacttcttgaacagaaaacacaagaaagtcaaaaaaagaagcaacaagatgattctgatgaatatgatgatgacgactctgcagcctcaacttcatttcagccacagcctgttcaacctcagcaaggttatattcctccaatggcacagccaggactgccaccagtaccaggagcaccaggaatgcctccaggcatacctccattaatgccaggtgttcctcctctgatgccaggaatgccaccagttatgccaggcatgccacctggattgcatcatcagagaaaatacacccagtcattttgcggtgaaaacataatgatgccaatgggtggaatgatgccacctggaccaggaataccacctctgatgcctggaatgccaccaggtatgcccccacctgttccacgtcctggaattcctccaatgactcaagcacaggctgtttcagcgccaggtattcttaatagaccacctgcaccaacagcaactgtacctgccccacagcctccagttactaagcctcttttccccagtgctggacaggctcaggcagctgtccaaggacctgttggtacagatttcaaacccttaaatagtacccctgcaacaactacagaacccccaaagcctacattccctgcttatacacagtctacagcttcaacaactagtacaacaaatagtactgcagctaaaccagcggcttcaataacaagtaagcctgctacacttacaacaactagtgcaaccagtaagttgatccatccagatgaggatatatccctggaagagagaagggcacagttacctaagtatcaacgtaatcttcctcggccaggacaggcccccatcggtaatccaccagttggaccaattggaggtatgatgccaccacagccaggcatcccacagcaacaaggaatgagacccccaatgccacctcatggtcagtatggtggtcatcatcaaggcatgccaggataccttcctggtgctatgcccccgtatgggcagggaccgccaatggtgcccccttaccagggtgggcctcctcgacctccgatgggaatgagacctcctgtaatgtcgcaaggtggccgttactgatcttacttcatccagtctaataggtttggagattaaaccttttctcaacttgtgctgtttatatagccaagcttccgtcaataaggcttcattgtgactttaacaaacattatcttcccacataccaggaactattggacatttattttacatgggaaaaattatttggaataataaagcaggaacttttcctgaagttgcaatttatactgtatggcttctttttcatgtttcatctaggtttttagaagtgaagtatagtaaatttggttcgttaaattgtgaaggcgctggaattacatgaacataccaccctagtaaaggcaagttctgtaagcttacattgctatttgtaaagtttgccttcacagcatttcagatgctgttggacttcatgtccccaacctagcttggtgagggctgtaactgtttccaagtacttgtacattggaagtctgaatgtgtaacaatatttaatgtatttagagttcctcatgttgcagggtttaagaaatctgacccaccaaggtcatgtgacttttctgtactgttaaacttcattgtaataaaatgagagaaaaatttatgcctttttattcataacccagctgtggaccactgcctgaaaggtttgtacagatgcatgccacagtagatgtccacataataaaattcatagttaccaatgcagtttanatatatcattggattctgtctttgagttgtaggttatttcttagctgcatgttttaaactgaatttgcatagagttgtatgttaatgtttcagttaagagaaaaacttaagatacatgagtcattacataatgggtatgaaatctttataatcacccttccaccctctatggtgtcagtacacatcacgtgtcatagatacttaaaatgtaaatgttaacacttttccttcctgctgagatgtttagagcctagtgccagacccattcatttccttttgattatttttgagactcagtactagcttcttgtgctgttaatgggttattatatattattctaagtgtaatgctgagaatctaaatgtgtctctgttgggatggttaacagntga

SEQ ID NO: 514 - DNA, 2048 bp, Homo sapiens
tttgtcagatgatcagtctctactgattatcttgctgcttaaaggcctgctcaccaatctttctttcacaccgtgtggtccgtgttactggtatacccagtatgttctcactgaagacatggactttatatgttcaagtgcaggaattggaaagttggacttgttttctatgatccaaaacagccctataagaaggttggaaaaggaggaactatatagcagcctttgctattttctgctaccatttcttttcctctgaagcggccatgacattccctttggcaactaacgtagaaactcaacagaacattttcctttcctagagtcaccttttagatgataatggacaactatagacttgctcattgttcagactgattgcccctcacctgaatccactctctgtattcatgctcttggcaatttctttgactttcttttaagggcagaagcattttagttaattgtagataaagaatagttttcttcctcttctccttgggccagttaataattggtccatggctacactgcaacttccgtccagtgctgtgatgcccatgacacctgcaaaataagttctgcctgggcattttgtagatattaacaggtgaattcccgactcttttggtttgaatgacagttctcattccttctatggctgcaagtatgcatcagtgcttcccacttacctgatttgtctgtcggtggccccatatggaaaccctgcgtgtctgttggcataatagtttacaaatggttttttcagtcctatccaaatttattgaaccaacaaaaataattacttctgccctgagataagcagattaagtttgttcattctctgctttattctctccatgtggcaacattctgtcagcctctttcatagtgtgcaaacattttatcattctaaatggtgactctctgcccttggacccatttattattcacagatggggagaacctatctgcatggacctctgtggaccacagcgtacctgcccctttctgccctcctgctccagccccacttctgaaagtatcagctactgatccagccactggatattttatatcctcccttttccttaagcacaatgtcagaccaaattgcttgtttctttttcttggactactttaatttggatcctttgggtttggagaaagggaatgtgaaagctgtcattacagacaacaggtttcagtgatgaggaggacaacactgcctttcaaactttttactgatctcttagattttaagaactcttgaattgtgtggtatctaataaaagggaaggtaagatggataatcactttctcatttgggttctgaattggagactcagtttttatgagacacatcttttatgccatgtatagatcctcccctgctatttttggtttatttttattgttataaatgctttctttctttgactcctcttctgcctgcctttggggataggtttttttgtttgtttatttgcttcctctgttttgttttaagcatcattttcttatgtgaggtggggaagggaaaggtatgagggaaagagagtctgagaattaaaatattttagtataagcaattggctgtgatgctcaaatccattgcatcctcttattgaatttgccaatttgtaatttttgcataataaagaaccaaaggtgtaatgttttgttgagaggtggtttagggattttggccctaaccaatacattgaatgtatgatgactatttgggaggacacatttatgtacccagaggcccccactaataagtggtactatggttacttccttgtgtacatttctcttaaaagtgatattatatctgtttgtatgagaaacccagtaaccaataaaatgaccgcatattcctgactaaacgtagtaaggaaaatgcacactttgtttttacttttccgtttcattctaaaggtagttaagatgaaatttatatgaaagcatttttatcacaaaataaaaaaggtttgccaagctcaaaaaaaaaaaaaaaaaaaaaaaraaaaaaaaaaaaaaaa

SEQ ID NO: 515 - DNA, 3300 bp, Homo sapiens
  misc_feature (1): n equals a,t,g, or c
  misc_feature (2): n equals a,t,g, or c
  misc_feature (126): n equals a,t,g, or c
nngacccacgcgtccgcggacggtgggtcgagacccacgcgtccgctttacagggacccagtctgccttcaagaaaagacagaagtagaaagggtggtggctgactgtctgacaaattgttatcangtatgcaggaagtatatccttctccaaaatatcatacttgcatcaccaggtagacacatttccttctacacagaattatcttcagagcttcttaaagcaaataaagcctgcttcaaggactgagtccctagtcgaattcccggaaggagtggagcctgtcatattggtgagggtttgccttgaatgtcatcccagtatttcaatattgattaattagtcttccctcatggtcccaactgcatagtttttattttgttgagtgttctgacacatggtaagggacatgaaagtatcctttgagataatctttccattcatcagtgtttatctagcatctgctcaagagtgtgctgcagtggagggaaatcagatgacctcccagtctggttgtgttacatacaatcatgtgtaagaagtgccattcaagccgtgtcactggaggggactgacagtgagtgagtgtggatagagaggacctcctggggtgggcaatgtgagccctcagactctgtaggtattgcattttgcagtgaacactggtagacatgttttgtggctcaagccagcatgtgtgtgatggtttaggattcaktgacttttgatgatctggctgtggacttcaccccagaagaatggactttactggacccaactcagagaaacctctacagagatgtgatgctggagaactacaagaatttggccacagtaggatatcagctcttcaaacccagtctgatctcttggctggaacaagaagagtctaggacagtgcagagaggtgatttccaagcttcagaatggaaagtgcaacttaaaaccaaagagttagcccttcagcaggatgttttgggggagccaacctccagtgggattcaaatgataggaagccacaacggaggggaggtcagtgatgttaagcaatgtggagatgtctccagtgaacactcatgccttaagacacatgtgagaactcaaaatagtgagaacacatttgagtgttatctgtatggagtagacttccttactctgcacaagaaaacctctactggagagcaacgttctgtatttagtcagtgtggaaaagccttcagcctgaacccagatgttgtttgccagagaacgtgcacaggagagaaagcttttgattgcagtgactctgggaaatccttcattaatcattcacaccttcagggacatttaagaactcacaatggagaaagtctccatgaatggaaggaatgtgggagaggctttattcactccacagaccttgctgtgcgtatacaaactcacaggtcagaaaaaccctacaaatgtaaggaatgtggaaaaggatttagatattctgcataccttaatattcacatgggaacccacactggagacaatccctatgagtgtaaggagtgtgggaaagccttcaccaggtcttgtcaacttactcagcacagaaaaactcacactggagagaaaccttataaatgtaaggattgtgggagagccttcactgtttcctcttgcttaagtcaacatatgaaaatccatgtgggtgagaagccttatgaatgcaaggaatgtgggatagccttcactagatcttctcaacttactgaacatttaaaaactcacactgcaaaggatccctttgaatgtaagatatgtggaaaatcctttagaaattcctcatgcctcagtgatcactttcgaattcacactggaataaaaccctataaatgtaaggattgtgggaaagccttcactcagaactcagaccttactaagcatgcacgaactcacagtggagagaggccctatgaatgtaaggaatgtggaaaggcctttgccagatcctctcgccttagtgaacatacaagaactcacactggagagaagccttttgaatgtgtcaaatgtgggaaagcctttgctatttcttcaaatcttagtggacatttgagaattcacactggagagaagccctttgagtgcctggaatgtggtaaagcatttacgcattcctccagtcttaataatcacatgcggacccacagcgccaaaaaaccattcacgtgtatggaatgtggcaaagcctttaagtttcccacgtgtgttaaccttcacatgcggatccacactggagaaaaaccctacaaatgtwaacagtgtgggaaatccttcagttactccaattcgtttcagttacatgaacgaactcacactggagagaaaccctatgaatgtaaggagtgcgggaaagccttcagttcttccagttcctttcgaaatcatgaaagaaggcatgcggatgagagactgtcagcataaggaatgtgggaaaacctaaaggtgtccctgttctctctgaagacatgaaaactcactggggagaaaccctatgaatgtaaaaatgtggaagcaactttgtatctcaggtcttaatgaacacatatgaattcacagtggagaagaccctgcatcagggaatgtggaaatgactttgctgaattctcaagccttaccaaacacatcagaaatctcactggagagaaacygtatgaatgtagagaatctgggaatacctttctgaatcccacaaaccttaatgtgtgtatgtgaactcacattggagagaaaccctgcaatttaaatggtatggtctggatgatgccccactccatatttgtaagccctaagtcctagttccttacactataactgtatttggacatagggttttcaaacaggtgagtaacttcaaatgaggttgttgggttcgatccctaatctgacatcactggtgtccctataagggaaactgaaggaaggatacacatggagaagactgtgtggatccaccagaagatggccatctacaagccaaggacagagacctggaacagatgctttcattatggcctccagaggaaaccaaccctgtctccaccttgatattgcacttccaggctccagaactgtgaggcaataaatttctcttggttaaatcattcagtctgttattttgtacagcaaccctaggaaactaatactgtgaggaacttgggaaaagctttagatcaagcttgtccaacccgcaggccaggatggctttgaatgcagaccaacacaaatttttaagctttcttcaaacataataaawtttttttgtgatta

SEQ ID NO: 516 - DNA, 3425 bp, Homo sapiens
  misc_feature (402): n equals a,t,g, or c
gggaagtccccgaggcgcacagagcaagcccacgcgagggcacctctggaggggagcgcctgcaggaccttgtaaagtcaaaaatgtcagaaacttccaggaccgcctttggaggcagaagagcagttccacccaataactctaatgcagcggaagatgacctgcccacagtggagcttcagggcgtggtgccccggggcgtcaacctgcaagatgatgctgtgtatctggacaatgagaaagaaagagaagagtatgtcctgaatgacatcggggtaattttttatggagaggtcaatgacatcaagaccagaagctggagctatggtcagtttgaagatggcatcctggacacttgcctgtatgtgatggacagagcacaaatggacctctctggaaganggaatcccatcaaagtcagccgtgtggggtctgcaatggtgaatgccaaagatgacgaaggtgtcctcgttggatcctgggacaatatctatgcctatggcgtccccccatcggcctggactggaagcgttgacattctattggaataccggagctctgagaatccagtccggtatggccaatgctgggtttttgctggtgtctttaacacatttttacgatgccttggaataccagcaagaattgttaccaattatttctctgcccatgataatgatgccaatttgcaaatggacatcttcctggaagaagatgggaacgtgaattccaaactcaccaaggattcagtgtggaactaccactgctggaatgaagcatggatgacaaggcctgaccttcctgttggatttggaggctggcaagctgtggacagcaccccccaggaaaatagcgatggcatgtatcggtgtggccccgcctcggttcaagccatcaagcacggccatgtctgcttccaatttgatgcaccttttgtttttgcagaggtcaacagcgacctcatttacattacagctaagaaagatggcactcatgtggtggaaaatgtggatgccacccacattgggaaattaattgtgaccaaacaaattggaggagatggcatgatggatattactgatacttacaaattccaagaaggtcaagaagaagagagattggccctagaaactgccctgatgtacggagctaaaaagcccctcaacacagaaggtgtcatgaaatcaaggtccaacgttgacatggactttgaagtggaaaatgctgtgctgggaaaagacttcaagctctccatcaccttccggaacaacagccacaaccgttacaccatcacagcttatctctcagccaacatcaccttctacaccggggtccygaaggcagaattcaagaaggagacgttcgacgtgacgctggagcccttgtccttcaagaaagaggcggtgctgatccaagccggcgagtacatgggtcagctgctggaacaagcgtccctgcacttctttgtcacagctcgcatcaatgagaccagggatgttctggccaagcaaaagtccaccgtgctaaccatccctgagatcatcatcaaggtccgtggcactcaggtagttggttctgacatgactgtgacagttgagtttaccaatcctttaaaagaaaccctgcgaaatgtctgggtacacctggatggtcctggagtaacaagaccaatgaagaagatgttccgtgaaatccggcccaactccaccgtgcagtgggaagaagtgtgccggccctgggtctctgggcatcggaagctgatagccagcatgagcagtgactccctgagacatgtgtatggcgagctggacgtgcagattcaaagacgaccttccatgtgaatgcacaggaagctgagatgaaccctggcatttggcctcttgtagtcttggctaaggaaattctaacgcaaaaatagctcttgctttgacttaggtgtgaagacccagacaggactgcagagggcyccagagtggagatcccacatatttcaaaaacatgcttttccaaacccaggctattcggcaaggaagttagtttttaatctctccaccttccaaagagtgctaagcattagctttaattaagctctcatagctcataagagtaacagtcatcatttatcatcacaaatggctacatctccaaatatcagtgggctctcttaccagggagatttgctcaatacctggcctcatttaaaacaagacttcagattccccactcagccttttgggaataatagcacatgatttgggctctagaattccagtcccctttctcggggtcaggttctaccctccatgtgagaatatttttcccaggactagagcacaacataatttttatttttggcaaagccagaaaaagatctttcattttgcacctgcagccaagcaaatgcctgccaaattttagatttaccttgttagaagaggtggccccatattaacaaattgcatttgtgggaaacttaaccacctacaaggagataagaaagcaggtgcaacactcaagtctattgaataatgtagttttgtgatgcattttatagaatgtgtcacactgtggcctgatcagcaggagccaatatcccttactttaaccctttctgggatgcaatactaggaagtaaagtgaagaatttatctctttagttagtgattatatttcacccatctctcaggaatcatctcctttgcagaatgatgcaggttcaggtcccctttcagagatataataagcccaacaagttgaagaagctggcggatctagtgaccagatatatagaaggactgcagccactgattctctcttgtccttcacatcacccatgttgagacctcagcttggcactcaggtgctgaagggtaatatggactcagccttgcaaatagccagtgctagttctgacccaaccacagaggatgctgacatcatttgtattatgttccaaggctactacagagaaggctgcctgctatgtatttgcaaggctgatttatggtcagaatttccctctgatatgtctagggtgtgatttaggtcagtagactgtgattcttagcaaaaaatgaacagtgataagtatactgggggcaaaatcagaatggaatgctctggtctatataaccacatttctaagcctttgagactgttcctgagccttcagcactaacctatgagggtgagctggtcccctctatatatacatcatacttaactttactaagtaatctcacagcatttgccaagtctcccaatatccaattttaaaatgaaatgcattttgctagacagttaaactggcttaacttagtatattattattaattacaatgtaatagaagcttaaaataaagttaaactgattatatttgaaaaaaaaaaaaaaaaaaaaaaaaaaaaaaaaaaggggggggggc

SEQ ID NO: 517 - DNA, 1358 bp, Homo sapiens
  misc_feature (1346): n equals a,t,g, or c
  misc_feature (1356): n equals a,t,g, or c
tcgacccacgcgtccggacccacgcgtccgagtcaacatcaggctactgaagttgaggctttagggtaactttcctatattgagcccatgggttacaaggatttgcaatatattgttccatttacagccaatacaggtttaatcgatgttcaatattggtttaggaaatttaaggccttctaaatcataatagctctttcatgtctaaaaccattttatgatattgccaaaatgtgataggaaacctactcattaaattgttaaactttttaatgactatgtgaagatatgaattgtttcctgaagataatactcttaattgagttgtattgtacttcttaggcaaagcagtgtaaaactgtatcaattaaggcttgtgagtagtgatttccactggggcatcagagtcttggctgggctgaatctgctgcttgttggttcagtgtttcttatgaacaagagccacagtacagagcttcaagttatttaaaatactaagtcatcttacgtttccattttattaacgggatgttgcaatcgtttgtaaactaataaacttataaagtgattggcacaaagactccttgagcaaaagctgtgcagttaagtacaaaaagatacttaatttggagactcttacagtaatttttgccatgtcaaaacaatggcttttacattgaaagattaatagaaactctacatatgttaatttttttatagaacctgactcaaatcaaggtactctccattttattgccttacctgaatcagtcctttttggttggtaatagatttttttatacacccacgtttgatttaaaagtaaattctagttcttaagcacttttaacaagaaatccagaagcacatttttctgcacaaacaagttacaaagttcaaaagtgtttcttgtgcattagctttgagattcagtttttaactttgtaaaccacatctgagagacttgtcatttctacattgtgtgtgtttaatttcttttgattccattttggttaagagagcagtaaatagattttctggtattcttgttcacttgattacatttgtataaagttctgattgccagttgctcagataacaagtgacaaggcagaattctttaaatcagtaaagttccttaagcctaaggctaaatcttgaatacattgttgaattctttaatatcctgatggcaagcagactgatagctgcacatttggcatgctttgtttaatggattttatttttaattgcagatttatttggcaatgtacagtaaattttgtaaacttgcatcaagtttatgaataaagaaccatttaaaaaaaaaaaaaaaaaaaaaaagnaggaaagaanag

SEQ ID NO: 518 - DNA, 1368 bp, Homo sapiens
  misc_feature (1225): n equals a,t,g, or c
  misc_feature (1311): n equals a,t,g, or c
  misc_feature (1333): n equals a,t,g, or c
  misc_feature (1335): n equals a,t,g, or c
  misc_feature (1347): n equals a,t,g, or c
gcggattgcaacacatgcagctgcctggagagagggagccggtgtcctacgtcagagccgccgccgccgcggagccgccgccggggaggagcagccgctgccgcccaggactgggcccttagggaggaggaggcgagaagatggcggacgaccccagtgctgccgacaggaacgtggagatctggaagatcaagaagctcattaagagcttggaggcggcccgcggcaatggcaccagcatgatatcattgatcattcctcccaaagaccagatttcacgagtggcaaaaatgttagcggatgagtttggaactgcatctaacattaagtcacgagtaaaccgcctttcagtcctgggagccattacatctgtacaacaaagactcaaactttataacaaagtacctccaaatggtctggttgtatactgtggaacaattgtaacagaagaaggaaaggaaaagaaagtcaacattgactttgaacctttcaaaccaattaatacgtcattgtatttgtgtgacaacaaattccatacagaggctcttacagcactactttcagatgatagcaagtttggattcattgtaatagatggtagtggtgcactttttggcacactccaaggaaacacaagagaagtcctgcacaaattcactgtggatctcccaaagaaacacggtagaggaggtcagtcagccttgcgttttgcccgtttaagaatggaaaagcgacataactatgttcggaaagtagcagagactgctgtgcagctgtttatttctggggacaaagtgaatgtggctggtctagttttagctggatccgctgactttaaaactgaactaagtcaatctgatatgtttgatcagaggttacaatcaaaagttttaaaattagttgatatatcctatggtggtgaaaatggattcaaccaagctattgagttatctactgaagtcctctccaacgtgaaattcattcaagagaagaaattaataggacgatactttgatgaaatcagccaggacacgggcaagtactgttttggcgttgaagatacactaaaggctttggaaatgggagctgtagaaattctaatagtctatgaaaatctggatataatgagatatgttcttcattgccaaggcacagaagaggagaaaattctctatctaactccagagcaagaaaaggataaatctcatttcacagacaaagaganccggacaggaaccatgascttatcgagagcatgsccctktttggaawggkttgstaacaactwtaaaaaattgggacttccttggnaaattggcccaattaattcccnanaaaggggtcaantttggaaaagaattgggggaa

SEQ ID NO: 519 - DNA, 933 bp, Homo sapiens
ccacgcgtccgcggacgcgtgggcggacgcgtgggtggcaggatcagattttattaagacctctactggaaaagaaacagtaaatgccaccttcccggtagctatagtaatgctgcgggccattagagatttcttctggaaaactggaaacaagatagggtttaaaccagcaggaggcatccgcagtgcaaaggattcccttgcttggctctctcttgtaaaggaggagcttggagatgagtggctgaagccagaactctttcgaataggtgccagtactctgctctcggacattgagaggcagatttaccatcatgtgactggaagatatgcagcttatcatgatcttccaatgtcttaaatcagtcaccagttccagaaaagttctttacgacaatgtttaaaaattatttttctacgtaattgctaaaattatttaattaaaaaattgggcagtaggtaactggcattcctctctttaaaatttctaccgaacttaatggaatggaaaaagcaaactcatccacatgtggtactcatttcaggcacatctgaaatgatcttaattactagaagatctgcactattaactttgtgaagagtttctcctaaaaactttaagtaaaatgttaatggtagctttgataacatcaaattctaagggagaaaaaaacaatattaaaccgcccaagcagtgtgccctagcagaggaaaatgcaacatctcgcaagcgctgctgtaacgacttcaggagtcactgattcagcactaatttcctgctgtgaaaactcatctttcatttttgccgtggataggcgcttttattaattgttgtcctaatgaaatttctgacattgtcatatacaacgatgaatatcattaaaatttttaaaataaaaaaaaaaaaaaaaaaaaactcgagggggggcccgg

SEQ ID NO: 520 - DNA, 1430 bp, Homo sapiens
  misc_feature (104): n equals a,t,g, or c
  misc_feature (105): n equals a,t,g, or c
  misc_feature (1428): n equals a,t,g, or c
gcggacgcgtgggcggacgcgtgggcggacgcgtgggtttcacagccaaagtgtgggatgctgtctcaggagatgaattgatgaccctggctcataaacacatnntcaagactgtggatttcacgcaggatagtaattatttgttaaccgggggacaggataaactgttacgcatatatgacttgaacaaacctgaagcagaacctaaggaaattagtggtcatacttctggtataaaaaaagctctgtggtgcagtgaggataaacagattctttctgctgatgacaaaactgttcgactttgggatcatgctactatgacagaagtgaaatctctaaattttaatatgtctgttagtagtatggaatatattcctgagggagagattttggttataacttatggacgatctattgcttttcatagtgcagtaagtttggacccaattaaatcctttgaagctcctgcaaccatcaattctgcatctcttcatcctgagaaagaatttcttgttgcaggcggtgaagattttaaactttataagtatgattataatagtggagaagaattagaatcctacaagggacactttggtcctattcactgtgtgagatttagtcctgatggagaactctatgccagtggttcagaagatggaacattgagactatggcaaactgtggtaggaaaaacgtatggcctttggaaatgtgtgcttcctgaagaagatagtggtgagctggcaaagccaaagattggttttccagagacaacagaagaggagctagaagaaattgcttcagagaattcagattgcatctttccttcagctcctgatgttaaggcctgagcgtcaatcatatgttgcagttagtatacaactgactaaaacaagcaagcagagaaaagcatcagccttccagagttactgtctgcttaaggcagaaacagcagtaaataatgaggaaaatgaattagctccagtgctggaacaactaactaacttggtgttacctgtaagtgaaaactcaagtgtcagatgaagggaggtggagttatcctcttatagtacagtggcctgttatctttttaatgaatatatacaagccaacatccaatttctattattacaattagggttcttgtagctgtttatgttaatatggagaagaaaactatattggctgattttttctgatcttaaagcagaatgccttttctttttttgcttcagttgtaaagaagagggaatacatgataaagtaactggtttgatttctcgttcattgtacactgcctctgaacatctaattgtttttagttgtctaaataaaatgcctctaaaacaaaaaaaaaaaaaaaaaaaaaaaaaaaaaaaaaaaaaaaaaaaaaaaaaaaaaaaaaaaaaaaaaaaaaaaaaaaaaaanaa

SEQ ID NO: 521 - DNA, 1169 bp, Homo sapiens
  misc_feature (1159): n equals a,t,g, or c
  misc_feature (1166): n equals a,t,g, or c
gcccacgcgtccgcccacgmgyccgcgtggagttgtgaacgccgcggactccggagccgcacaaaccagggctcgccatgaagccaggattcagtccccgtgggggtggctttggcggccgagggggctttggtgaccgtggtggtcgtggaggccgagggggctttggcgggggccgaggtcgaggcggaggctttagaggtcgtggacgaggaggaggtggaggcggcggcggcggtggaggaggaggaagaggtggtggaggcttccattctggtggcaaccggggtcgtggtcggggaggaaaaagaggaaaccagtcggggaagaatgtgatggtggagccgcatcggcatgagggtgtcttcatttgtcgaggaaaggaagatgcactggtcaccaagaacctggtccctggggaatcagtttatggagagaagagagtctcgatttcggaaggagatgacaaaattgagtaccgagcctggaaccccttccgctccaagctagcagcagcaatcctgggtggtgtggaccagatccacatcaaaccgggggctaaggttctctacctcggggctgcctcgggcaccacggtctcccatgtctctgacatcgttggtccggatggtctagtctatgcagtcgagttctcccaccgctctggccgtgacctcattaacttggccaagaagaggaccaacatcattcctgtgatcgaggatgctcgacacccacacaaataccgcatgctcatcgcaatggtggatgtgatctttgctgatgtggcccagccagaccagacccggattgtggccctgaatgcccacaccttcctgcgtaatggaggacactttgtgatttccattaaggccaactgcattgactccacagcctcagccgaggccgtgtttgcctccgaagtgaaaaagatgcaacaggagaacatgaagccgcaggagcagttgacccttgagccatatgaaagagaccatgccgtggtcgtgggagtgtacaggccaccccccaaggtgaagaactgaagttcagcgctgtcaggattgcgagagatgtgtgttgatactgttgcacgtgtgtttttctattaaaagactcatccgtcaaaaaaaaaaaaaaaaaarggggggccgctaggggntccaagntta

SEQ ID NO: 522 - DNA, 2162 bp, Homo sapiens
  misc_feature (169): n equals a,t,g, or c
  misc_feature (2133): n equals a,t,g, or c
  misc_feature (2136): n equals a,t,g, or c
  misc_feature (2139): n equals a,t,g, or c
gccgggcgcggagaagtcggggcgggcggcagagaggccgggacgcggaccgggccggggcgcccacagccgcccgacggcgcccagagagcgcgcgccccgcagccccgcgcctagcccgccgggcatggggcgcgcggcagccgctgaagccccggcctggcccggncgcacccggccggaggcggagggcagagcgcgcgcccagttgcccgggcaccaaatcggagcgcggcgtgcgggagggcccagagcaggactggaaatgtcctggccgcgccgcctcctgctcagatacctgttcccggccctcctgcttcacgggctgggagagggttctgccctccttcatccagacagcaggtctcatcctaggtccttagagaaaagtgcctggagggcttttaaggagtcacagtgccatcacatgctcaaacatctccacaatggtgcaaggatcacagtgcagatgccacctacaatcgagggccactgggtctccacaggctgtgaagtaaggtcaggcccagagttcatcacaaggtcctacagattctaccacaataacaccttcaaggcctaccaattttattatggcagcaaccggtgcacaaatcccacttatactctcatcatccggggcaagatccgcctccgccaggcctcctggatcatccgagggggcacggaagccgactaccagctgcacaacgtccaggtgatctgccacacagaggcggtggccgagaagctcggccagcaggtgaaccgcacatgcccgggcttcctcgcagacgggggtccctgggtgcaggacgtggcctatgacctctggcgagaggagaacggctgtgagtgcaccaaggccgtgaactttgccatgcatgaacttcagctcatccgggtggagaagcagtaccttcaccacaacctcgaccacctggtcgaggagctcttccttggtgacattcacactgatgccacccagaggatgttctaccggccctccagttaccagccccctctgcagaatgccaagaaccacgaccatgcctgcatcgcctgtsggatcatctatcggtcagacgagcaccaccctcccatcctgcccccaaaggcagacctgaccatcggcctgcacggggagtgggtgagccagcgctgtgaggtgcgccccgaagtcctcttcctcacccgccacttcatcttccatgacaacaacaacacctgggagggccactactaccactactcagacccggtgtgcaagcaccccaccttctccatctacgcccggggccgctacagccgcggcgtcctctcgtccagggtcatgggaggcaccgagttcgtgttcaaagtgaatcacatgaaggtcacccccatggatgcggccacagcctcactgctcaacgtcttcaacgggaatgagtgcggggccgagggctcctggcaggtgggcatccagcaggatgtgacccacaccaatggctgcgtggccctgggcatcaaactacctcacacggagtacgagatcttcaaaatggaacaggatgcccgggggcgctatctgctgttcaacggtcagaggcccagcgacgggtccagcccagacaggccagagaagagagccacgtcctaccagatgcccttggtccagtgtgcctcctcttcgccgagggcagaggacctygcagaagacagtggaagcagcctgtatggccgggcccctgggaggcacacctggtccctgctgctggctgcacttgcctgycttgtccctctgctgcattggaacatccgcagatagaagttttagaaagttctatttttccaaaccaggattccttactattgacagatttkctttaccaaaagaaaagacatttattcttttgatgcacttgaatgccagagaactgtccttctttttctcctctccctccctcccagcccctgagtcatgaacagcaaggagtgtttgaagtttctgctttgaactccgtccagcctgatccctggcctgagcaacttcacaacagtaattgcactttaagacagcctagagttctggacgagcgtgtttggtagcagggatgaaagctaccwwatttttttctcttrattatttgnacnaanttgagtagaagttatttcccttt

SEQ ID NO: 523 - DNA, 799 bp, Homo sapiens
  misc_feature (443): n equals a,t,g, or c
  misc_feature (758): n equals a,t,g, or c
tctctctccctctcttccttccccctgccccaaaactaaagtaaaataacgttaactgcccgtttttctgtaaccagcagaccttatctatactcccaattccaattccttgtaaacatactttgtaaagtcctgtaagatcctgtctcctttgccatgacgctgcaaggtcataaagtagataaaacctaagttgcaattccggttttcctcaagatctaagacatgttacaaatggttaattgcctttgtttctcgctttggtaacatcttcccgcctcaggtatttcccgccttgaagagtttaaaaggcaatcctataatctaactctggctacccattctggaccccctccatgctttggaagctttgtactttcactctgctcaataaagcctrcagctttttctcactctcagtccatgtctctttcactcactgnggtcagcttccacaccatttctttggtgtggcttggcaagaacctcaggtgttacatcttggcgagccagacaggagactccagaaaaggatcaaagccatcaagctacaaatratcttacaaatggaacctcaaatgagctcagctcacggcttctaccgaggacccctggwtcaacccgctggtccctcaattaccctagaaaattcccctctggaggacaccaaactgcagggccccttyttcacccctaaccagcaggaagtagccagaacggactgccacamggttcccaacagcarttkggggtgtccngttttagaggcaggatttagaggaggtgcccaattgggttt

SEQ ID NO: 524 - DNA, 1722 bp, Homo sapiens
  misc_feature (13): n equals a,t,g, or c
  misc_feature (36): n equals a,t,g, or c
  misc_feature (40): n equals a,t,g, or c
ttccacgcgtttnagagaagggaactcccacagcanaggncataaaaccatccagggcagtctggggcggctcagttctgcggtgccagggagtggagcagagctcagccccgtcccaaayacagatgggaccatgaactccggacacagcttcagccagaccccctcggcctccttccatggcgccggaggtggctggggccggcccaggagcttccccagggctcccaccgtccatggcggtgcggggggagcccgcatctccctgtccttcaccacgcggagctgcccaccccctggagggtcttggggttctggaagaagcagccccctactaggcggaaatgggaaggccaccatgcagaatctcaacgaccgcctggcctcctacctggagaaggttcgcgccctggaggaggccaacatgaagctggaaagccgcatcctgaaatggcaccagcagagagatcctggcagtaagaaagattattcccagtatgaggaaaacatcacacacctgcaggagcagatagtggatggtaagatgaccaatgctcagattattcttctcattgacaatgccaggatggcagtggatgayttcaacctcaagtwtgaaaatgaacactcctttaaaaaagacttggaaattgaagtcsagggcctccgaaggaccttagacaacctgaccattgtcacaacagacctagaacaggaggtggaaggaatgaggaaagagctcattctcatgaagaagcaccatgagcaggaaatggagaagcatcatgtgccaagtgacttcaatgtcaatgtgaaggtggatacaggtcccagggaagatctgattaaggtcctggaggatatgagacaagaatatgagcttataataaagaagaagcatcgagacttggacacttggtataaagaacagtctgcagccatgtcccaggaggcagccagtccagccactgtgcagagcagacaaggtgacatccacgaactgaagcgcacattccaggccctggagattgacctgcagrcacagtacagcacgaaatctgctttggaaaacatgttatccgagacccagtctcgktactcctgcaagctccaggacatgcaagagatcatctcccactatgaggaggaactgacgcagctacgccaygaactggagcggcagaacaatgaataccaagtgctgctgggcatcaaaacccacctggagaaggaaatcaccacgtaccgacggctcctggagggagagagtgaagggacacgggaagaatcaaagtcgagcatgaaagtgtctgcaactccaaagatcaaggccataacccaggagaccatcaacggaagattagttctttgtcaagtgaatgaaatccaaaagcacgcatgagaccaatgaaagtttccgcctgttgtaaaatctattttcccccaaggaaagtccttgcacagacaccagtgagtgagttctaaaagatacccttggaattatcagactcagaaacttttattttttttttctgtaacagtctcaccagacttctcataatgctcttaatatattgcacttttctaatcaaagtgcgagtttatgagggtaaagctctactttcctactgcagccttcagattctcatcattttgcatctattttgtagccaataaaactccgcactagcaaaaaaaaaaaaaaaaaaaaaaaagttcgac

SEQ ID NO: 525 - DNA, 562 bp, Homo sapiens
  misc_feature (515): n equals a,t,g, or c
  misc_feature (526): n equals a,t,g, or c
  misc_feature (557): n equals a,t,g, or c
tcccgggcccgagggcatcagacggcggctgattagctccggtttgcatcacccggaccgggggattagctccggtttgcatcacccggaccgggggattagctccggtttgcatcacccggaccgggggccgggcgcgcacgagactcgcagcggaagtggaggcggctccgcgcgcgtccgctgctaggacccgggcagggctggagctgggctgggatcccgagctcggcagcagcgcagcgggccggcccacctgctggtgccctggargctctgagccccggcggcgcccgggcccacgcggaacgacggggcgagatgcgagccacccctctggctgctcctgcgggttccctgtccaggaagaagcggttggagttggatgacaacttagataccgagcgtcccgtccagaaacgagctcgaagtgggccccagcccagactgcccccctgcctgttgcccctgagcccacctactgctccagatcgtgcaactgctgtggscactgnctcccgtyttnggscctatgtcctyctkgaagcccgaagaanggcgg

SEQ ID NO: 526 - DNA, 2023 bp, Homo sapiens
  misc_feature (12): n equals a,t,g, or c
aaagtgataacncaactaatggttgtggacttgaatctycaggaaatactgttacacctgtaaatgttaatgaagttaaacccataaacaaaggtgaagaacaaattggttttgagctagtggagaaattatttcaaggtcagctggtattaaggacgcgttgcttggaatgtgaaagtttaacagaaagaagagaagattttcaagacatcagtgtgccagtacaagaagatgagctttccaaagtagaggagagttctgaaatttctccagagccaaaaacagaaatgaagaccctgagatgggcaatttcacaatttgcttcagtagaaaggattgtaggagaagataaatatttctgtgaaaactgccatcattatactgaagctgaacgaagtcttttgtttgacaaaatgcctgaagttataactattcatttgaagtgctttgctgctagtggtttggagtttgattgttatggtggtggactttccaagatcaacactcctttattgacacctcttaaattgtcactagaagaatggagcacaaagccaactaacgacagctatggattatttgcggttgtgatgcatagtggcattacaattagtagtgggcattacactgcttctgttaaagtcactgaccttaacagtttagaactagataaaggaaattttgtggttgaccaaatgtgtgaaataggtaagccagaaccattgaatgaggaggaagcaaggggtgtggttgagaattataatgatgaagaagtgtcaattagagttggtggaaatacacagccaagtaaagttttgaacaaaaaaaatgtagaagctattggacttcttggaggacaaaagagcaaagcagattatgagctatacaacaaagcctctaatcctgataaggttgctagtacagcgtttgctgaaaatagaaattctgagactagtgatactactgggacccatgaatctgatagaaacaaggaatccagtgaccaaacaggcattaatattagtggatttgagaacaaaatttcatacgtagtgcaaagcttaaaggagtatgaggggaagtggttgctttttgatgattctgaagtcaaagttactgaagagaaggactttctgaattctctttccccttctacatctcctacttctactccttacttgctattttataagaaattatagagtgagtgtattttccttgtgtatatattaaacacacccatacaaacattggtaaagttgattacatcaaagaatctttagcttatcttttgaagctactggatattattggtctctctaggtttttatataaatagtgaaatytgaattactgaaaaccatgttaatttttagaactcattttcctcagtagagactagtgatgcattagcttctgggaacaaacttgtatcggttcttaattaaattatccaaaacggaggcatttaaacacttggatttacaccagtcttttgtgtttgctttttaaaataaagtgctcgtatttgtattctccatattttggagtaattatctacatgatgtttatagttcctgtggtttttcacccaagaagcagaatctcattcagtacatttagttttataagagtcatgaagctaaatccttgggctatgtcagaggcacaaagtctagaatgtgtgtattcacaatggtgtatgtacattttgtgccttgattcacttagaagtgtctcagaaaacctggacagttcgcttctacacaagaattttatatgtatttatgaagatgattctgtaccctagtatatctttttgggcatggactaatttgtatctgtttaactcatattctgcacgatctgtatatagtacatcaaacttagaggtgtgaccttaaatttaactttttttaaaaactgggaggtcaataaaatttaaactgcttaactatgtatatgaatatttgaattttttacttgtatatttttataaatacagctgagttttcttaaagcg

SEQ ID NO: 527 - DNA, 2847 bp, Homo sapiens
  misc_feature (286): n equals a,t,g, or c
  misc_feature (290): n equals a,t,g, or c
  misc_feature (2842): n equals a,t,g, or c
ggcacaggttattctgtgtctttcatagtagaaaccttaatgatcggtctgttgtagtgaactctttaaaaaggcgctatagaaaaccaatttctgagtaaaccagcagacagcatgacttgtaaatggtcttttaattaattaaaaagaaattagtcagctacaagcatgaacatgtggaacgcttacctttgtactaggcgtttttgtttttgttttaatggcttttggaatattatagtattaacatctggaaaactaggtaaatttatcttagaattaagtntttngctccttttttgcagaaaaagaacagcaagaagcgattgaacacattgatgaagtacaaaatgaaatagacagacttaatgaacaagccagtgaggagattttgaaagtagaacagaaatataacaaactccgccaaccattttttcagaagaggtcagaattgatcgccaaaatcccaaatttttgggtaacaacatttgtcaaccatccacaagtgtctgcactgcttggggaggaagatgaagaggcactgcattatttgaccagagttgaagtgacagaatttgaagatattaaatcaggttacagaatagatttttattttgatgaaaatccttactttgaaaataaagttctctccaaagaatttcatctgaatgagagtggtgatccatcttcgaagtccaccgaaatcaaatggaaatctggaaaggatttgacgaaacgttcgagtcaaacgcagaataaagccagcaggaagaggcagcatgaggaaccagagagcttctttacctggtttactgaccattctgatgcaggtgctgatgagttaggagaggtcatcaaagatgatatttggccaaacccattacagtactacttggttcccgatatggatgatgaagaaggagaaggagaagaagatgatgatgatgatgaagaggaggaaggattagaagatattgacgaagaaggggatgaggatgaaggtgaagaagatgaagatgatgatgaaggggaggaaggagaggaggatgaaggagaagatgactaaatagaacactgatggattccaaccttcctttttttaaattttctccagtccctgggagcaagttgcagtcttttttttttttttttttttttccctcttgtgctcagtcgccctgttcttgaggtctcttttctctactccatggttctcaatttatttggggggaaataccttgagcagaatacaatgggaaaagagtctctacccctttctgttcgaagttcatttttatcccttcctgtctgaacaaaaactgtatggaatcaacaccaccgagctctgtgggaaaaaagaaaaacctgctcccttcgctctgctggaagctggagggtgctaggcccctgtgtagtagtgcatagaattctagcttttttcctcctttctctgtatattgggctcagagagtacactgtgtctctatgtgaatatggacagttagcatttaccaacatgtatctgtctactttctcttgtttaaaaaaagaaaaaaaaacttaaaaaaatggggttatagaaggtcagcaaagggtgggtttgagatgtttgggtgggttaagtgggcattttgacaacatggcttctcctttggcatgtttaattgtgatatttgacagacatccttgcagtttaagatgacacttttaaaataaattctctcctaatgatgacttgagccctgccactcaatgggagaatcagcagaacctgtaggatcttatttggaattgacattctctattgtaattttgttcctgtttatttttaaattttctttttgtttcactggaaaggaaagatgatgctcagttttaaacgttaaaagtgtacaagttgctttgttacaataaaactaaatgtgtacacaaaggatttgatgcttttctctcagcataggtatgcttactatgaccttccaagtttgacttgtataacatcactgtcaaactttgtcaccctaacttcgtattttttgatacgcactttgcaggatgacctcagggctatgtggattgagtaatgggatttgaatcaatgtattaatatctccatagctgggaaacgtgggttcaatttgccattggtttctgaaagtattcacatcatttgggataccagatagctcaatactctctgagtacattgtgcccttgatttttatctccaagtggcagtttttaaaattggccttttacctggatataaattaattgtgcctgccaccaccatccaacagacctggtgctctaatgccaagttatacacgggacagttgctggcatgtcttcattggctatataaaatgtggccaagaagataggctctcagtaagaagtctgatggtgagcagtaactgtccctgctttctggtataaagctctcaaatgtgaccatgtgaatctgggtgggataatggactcagctctgtctgctcaatgccattgtgcagagaagcaccctaatgcataagctttttaatgctgtaaaatatagtcgctgaaattaaatgccactttttcagaggtgaattaatggacagtctggtgaacttcaaaagctttttgatgtataaaacttgataaatggaactattccatcaataggcaaaagtgtaacaacctatctagatggatagtatgtaatttctgcacaggtctctgtttagtaaatacatcactgtataccgatcaggaatcttgctccaataaaggaacataaagatttaaaaaaaaaaaaaaaaaaaaaaaaaaaaaaaaaaaaaaaaaaaaaaaaaaaaanaaaaa

SEQ ID NO: 528 - DNA, 816 bp, Homo sapiens
  misc_feature (8): n equals a,t,g, or c
  misc_feature (22): n equals a,t,g, or c
  misc_feature (94): n equals a,t,g, or c
aaaacgantgtgtaattaacanaggctgtgcgcatgaacgttgccgttatggttcgcgaattttccccggcgcccaatgcgagggagacgaaantatgtaaatgagtggattctggctgagctatcctattggctatcgggacaaaatttgcttgagccaatccaaagtgctccgtggacaatcgccgttctgtctataaaaaggtgaagcagcggcgttttcggcgactttcccgatcgccaggcaggagtttctctcggtgactactatcgctgtcatgtctggtcgtggcaagcaaggaggcaaggcccgcgccaaggccaagtcgcgctcgtcccgcgctggccttcagttcccggtaggcgagtgcatcgctctgcgcaaaggcaactacgcggagcgagtgggggccggcgcgcccgtctacatggctgcggtcctcgagtatctgaccgccgagatcctggagctggcgggcaacgcggctcgggacaacaagaagacgcgcatcatccctcgtcacctccagctggccatccgcaacgacgaggaactgaacaagctgctgggcaaagtcaccatcgcccagggcggcgtcttgcctaacatccaggccgtactgctccctaagaagacggagagtcaccacaaggcaaagggcaagtgaggctgacgtccgcccaagtggcccagcccggcccgcgtctcgaaggggcacctgtgaactcaaaaggctcttttcagagccacccacgttttcaaataaaagagttgttaatgctggcaaaaaaaaaaaaaaaaaaaaaaaaaaaaaa

SEQ ID NO: 529 - DNA, 885 bp, Homo sapiens
ggcagttaccggtgccgtaattcccgggtcggacccacgcgctctgtcgtggcgcggcttcccgcggtcttctctgcaaatgggctccgtggcctagcgcccccgtccccgccacccgtgatcgtgcgccgaggcccgcgaggggtcgccgcccagatcccaccagccagcaagctaaagcatggcggccatcccctccagcggctcgctcgtggccacccacgactactaccggcgccgcctgggttccacttccagcaacagctcctgcagcagtaccgagtgccccggggaagccattccccaccccccaggtctccccaaggctgacccgggtcattggtgggccagcttctttttcgggaagtccaccctcccgttcatggccacggtgttggagtccgcagagcactcggaacctccccaggcctccagcagcatgaccgcctgtggcctggctcgggacgccccgaggaagcagcccggcggtcagtccagcacagccagcgctgggcccccgtcctgacctgagcggttaccaccagccccaggcctgcggaggcgctagtccaccagagcccctycccgcccctctccccactccgcatccctcgcccccctccccacctcccaccccccaccctgtaaactaggcggctgcagcaagcagaccttcgcatcaacacagcagacaccaaaaaccagtgagagccccgctctctaccgcccggccccagcactcgctagctttcctgacacctggaactgtgcacctggcaccaagcggaaaataaactccaagcagccagtagccccgatggtgtgtgcctgagctgtgtggcccgaggttccaaaaaaaaaaaaaaaaaaaaaaaaaaaaaaaaa

SEQ ID NO: 530 - DNA, 742 bp, Homo sapiens
  misc_feature (693): n equals a,t,g, or c
  misc_feature (695): n equals a,t,g, or c
  misc_feature (715): n equals a,t,g, or c
  misc_feature (730): n equals a,t,g, or c
  misc_feature (741): n equals a,t,g, or c
ggtacctgacagtaccggtcggaattcccgggtcgacccacgcgtccgctgctgctcttaaaggtacaggcctcagggtccctgctgtagacggggcgggggagagtacgatgggtggggcgtggtgggtcgtagggcgctcgagatggagcccccagcttccttgatggatcgcggggcgcgagtgccctagacaagccggagctgggaccggcaatcgggcgttgatccttgtcacctgtcgcagaccctcatccctcccgtgggagccccctttggacactctatgaccctggaccctcgggggacctgaacttgatgcgatgggaggctgtgcaggctcgcggcggcgcttttcggattccgagggggaggagaccgtcccggagccccggctccctctgttggaccatcagggcgcgcattggaagaacgcggtgggcttctggctgctgggcctttgcaacaacttctcttatgtggtgatgctgagtgccgcccacgacatccttagccacaagaggacatcgggaaaccagagccatgtggacccaggcccaacgccgatcccccacaacagctcatcacgatttgactgcaactctgtctctacggctgctgtgctcctggcggacatcctccccacactcgtcatcaaattgttggstyctyttggscttcacctgctgcccntnaccgttgaggatgctgtgantctctgtgctttatnggggacagctng

SEQ ID NO: 531 - DNA, 525 bp, Homo sapiens
  misc_feature (502): n equals a,t,g, or c
  misc_feature (510): n equals a,t,g, or c
  misc_feature (523): n equals a,t,g, or c
gtcggcattcccgggtcgacccacgcgtccgggcccgtttccggcggcgtcgcgcgtttgcgarcctcgggtggtcctcagggagggtctctcggccagaacacgtggatgcccacccaccactgagcctcatggaggtggtaacatttggcgatgtggctgtgcacttctctcgggaggagtggcagtgtctggaccctggccagagggccctctacagggaagtgatgctggagaaccacagcagtgtggctggactagcaggattcctggttttcaagcctgagctgatctctcggctggagcagggagaagagccatgggtcctcgacctgcarggagcagaggggacagaggcaccaargacctccaagacaggtgaggcttagatcccatcgcagagaagccctggggtgargagaaactkcargaggggctcacaactgtrggtagctgtaggtgartcgcgggggctacactkggatgcctgggaatgctactnggggaaancagcatccaacanct

SEQ ID NO: 532 - DNA, 1925 bp, Homo sapiens
gtggtctgaggccggtacagctgcgcgtctgcgggaataggtgcagcgggcccttggcgggggactctgagggaggagctggggacggcgaccctaggagagttctttggggtgactttcaagatggactctactctaacagcaagtgaaatccggcagcgatttatagatttcttcaagaggaacgagcatacgtatgttcactcgtctgccaccatcccattggatgaccccactttgctctttgccaatgcaggcatgaaccagtttaaacccattttcctgaacacaattgacccatctcaccccatggcaaagctgagcagagctgccaatacccagaagtgcatccgggctgggggcaaacataatgacctggacgatgtgggcaaggatgtctatcatcacaccttcttcgagatgctgggctcttggtcttttggagattactttaaggaattggcatgtaagatggctctggaactcctcacccaagagtttggcattcccattgaaagactttatgktacttactttggcggggatgaagcagctggcttagaagcagatctggaatgcaaacagatctgcaaaatttgggaaatgattctggggaccattctgaccacatgcattactatcagggtaaaaaatatttccgagataggaggggaggtggcagaaattcagactggtcttcagatacaaatcgacaaggacaacagtcatcatctgactgctacatatatgattctgctactggctactattatgaccccttggcaggaacttattatgaccccaatacccagcaagaagtctatgtgccccaggatcctggattacctgaggaagaagagatcaaggaaaaaaaacccaccagtcaaggaaagtcaagtagcaagaaggaaatgtctaaaagagatggcaaggagaaaaaagacagaggagtgacgaggtttcaggaaaatgccagtgaagggaaggcccctgcagaagacgtctttaagaagcccctgcctcctactgtgaagaaggaagagagtccccctccacctaaagtggtaaacccactgatcggcctcttgggtgaatatggaggagacagtgactatgaggaggaagaagaggaggaacagacccctcccccacagccccgcacagcacagccccagaagcgagaggagcaaaccaagaaggagaatgaagaagacaaactcactgactggaataaactggcttgtctgctttgcagaaggcagtttcccaataaagaagttctgatcaaacaccagcagctgtcagacctgcacaagcaaaacctggaaatccaccggaagataaaacagtctgagcaggagctagcctatctggaaaggagagaacgagagggaaagtttaaaggaagaggaaatgatcgcagggaaaagctccagtcttttgactctccagaaaggaaacggattaagtactccagggaaactgacagtgatcgtaaacttgttgataaagaagatatcgacactagcagcaaaggaggctgtgtccaacaggctactggctggaggaaagggacaggcctgggatatggccatcctggattggcttcatcagaggaggctgaaggccggatgaggggccccagtgttggagcctcaggaagaaccagcaaaagacagtccaacgagacttaycgagatgctgttcgaagagtcatgtttgctcgatataaagaactcgattaagaaaggagacaagttccatgggatacaacctccctcttgttttgtttgtctctccttttcttttgttactgttcttgctgctagaacttttttaaataaactttttttcaatgtgaaaaaaaaaaaaaaaaaaaaaaaaaaaaaaaaaaaaaaaaaaaaaaaaaaaaaaaaggggggggg

SEQ ID NO: 533 - DNA, 502 bp, Homo sapiens
  misc_feature (469): n equals a,t,g, or c
  misc_feature (482): n equals a,t,g, or c
  misc_feature (487): n equals a,t,g, or c
catagaggcaaacggtacactgacagtaccgtccggaattcccgggtcgacccacgcgtccggtccgcaaagcctgagtcctgtcctttctctctccccggacagcatgagcttcaccactcgctccaccttctccaccaactaccggtccctgggctctgtccaggcgcccagctacggcgcccggccggtcagcagcgcggccagcgtctatgcaggcgctgggggctctggttcccggatctccgtgtcccgctccaccagcttcaggggcggcatggggtccgggggcctggccaccgggatagccgggggtctggcaggaatgggagcatccagaacgagaaggagaccatgcaaaagctgaacgaccgcctggcctcttacctggacaaaatgaaggagcctggagaccgagaaaccggaggctggaaagcaaaaacccgggagcactttggagaagaaggancccaggtcagagnctggnagccattaattcaag

SEQ ID NO: 534 - DNA, 1800 bp, Homo sapiens
tcgacccacgcgtccggccgcgcgcgccactgccaggcggggatcgggcggcgcgagctgaggtggtgagggactagctcccggatgtggagaagctggggagaaggcgtgggaggaagatggactcggtggagaagggggccgccacctccgtctccaacccgcgggggcgaccgtcccggggccggccgccgaagctgcagcgcaactctcgcggcggccagggccgaggtgtggagaagcccccgcacctggcagccctaattctggcccggggaggcagcaaaggcatccccctgaagaacattaagcacctggcgggggtcccgctcattggctgggtcctgcgtgcggccctggattcaggggccttccagagtgtatgggtttcgacagaccatgatgaaattgagaatgtggccaaacaatttggtgcacaagttcatcgaagaagttctgaagtttcaaaagacagctctacctcactagatgccatcatagaatttcttaattatcataatgaggttgacattgtaggaaatattcaagctacttctccatgtttacatcctactgatcttcaaaaagttgcagaaatgattcgagaagaaggatatgattctgttttctctgttgtgagacgccatcagtttcgatggagtgaaattcagaaaggagttcgtgaagtgaccgaacctctgaatttaaatccagctaaacggcctcgtcgacaagactgggatggagaattatatgaaaatggctcattttattttgctaaaagacatttgatagagatgggttacttgcagggtggaaaaatggcatactacgaaatgcgagctgaacatagtgtggatatagatgtggatattgattggcctattgcagagcaaagagtattaagatatggctattttggcaaagagaagcttaaggaaataaaacttttggtttgcaatattgatggatgtctcaccaatggccacatttatgtatcaggagaccaaaaagaaataatatcttatgatgtaaaagatgctattgggataagtttattaaagaaaagtggtattgaggtgaggctaatctcagaaagggcctgttcaaagcagacgctgtcttctttaaaactggattgcaaaatggaagtcagtgtatcagacaagctagcagttgtagatgaatggagaaaagaaatgggcctgtgctggaaagaagtggcatatcttggaaatgaagtgtctgatgaagagtgcttgaagagagtgggcctaagtggcgctcctgctgatgcctgttctactgcccagaaggctgttggatacatttgcaaatgtaatggtggccgtggtgccatccgagaatttgcagagcacatttgcctactaatggaaaaggttaataattcatgccaaaaatagaaattagcgtaatattgagaaaaaaatgatacagccttcttcagccagtttgcttttatttttgattaagtaaattccatgttgtaatgttacagagagtgtgatttggtttgtgatatatatatattgtgctctacttttctctttacgcaagataattatttagagactgattacagtctttctcagatttttagtaaatgcaagtaagaacatcatcaaagttcactttgtattgtaccctgtaaaactgtgtgtttgtgtgctttcaaagatgttgggattttatttatctggggacagtgtgtatggtaagacatgcccttctattaataaaactacatttctcaaacttgaaaaaaactcgtgccgaatt

SEQ ID NO: 535 - DNA, 2497 bp, Homo sapiens
  misc_feature (2467): n equals a,t,g, or c
  misc_feature (2487): n equals a,t,g, or c
  misc_feature (2493): n equals a,t,g, or c
ggcgggccagccaagatggcggcctcatgcttggtcctgctggcgctgtgtctgctgctgccgctgctgctgctgggaggatggaagcgctggcgccgggggcgggcggcccggcatgtagtagcggtggtgctgggcgacgtgggccgcagcccccgtatgcagtaccacgcgctgtcgttggccatgcacggcttctcggtgaccctcctggggttctgcaactccaaaccccatgatgagctcttgcagaacaacagaattcagattgtggggttgacagaacttcagagtcttgcagttgggccccgagttttccagtacggagtcaaagttgtacttcaggctatgtacttgctgtggaagttgatgtggagggagccaggtgcctatatctttctccagaaccccccaggtctgcctagcattgctgtctgctggttcgtgggctgcctttgtggaagcaagctcgtcattgactggcacaactatggctactccatcatgggtctggtgcatggccccaaccatcccctcgttctgctggccaagtggtacgagaagttctttgggcgcctgtcccacctgaacctgtgtgttaccaatgctatgcgagaagacctggcggataactggcacatcagggctgtgaccgtctacgacaagcccgcatctttctttaaagagacacctctggacctgcagcaccggctcttcatgaagctgggcagcatgcactctccgttcagggcccgctcagaacctgaggacccagtcacggagcggtcggccttcacggagcgggatgctgggagcgggctggtgacgcgtctccgtgagcggccagccctgctggtcagcagcacgagctggacagaggacgaagacttctccatcctgctggcagctttagaaaagtttgaacaactgactcttgatggacacaaccttccttctctcgtctgtgtgataacaggcaaagggcctctgagggagtattatagccgcctcatccaccagaagcacttccagcacatccaggtctgcaccccctggctggaggccgaggactaccccctgcttctagggtcggcggacctgggtgtctgtctgcacacgtcctccagtggcctggacctgcccatgaaggtggtggacatgttygggtgctgtttgcctgtgtgtgctgtgaacttcaagtgtttacatgagctggtgaaacatgaagaaaatggcctggtctttgaggactcagaggaactggcagctcagctgcagatgcttttctcaaactttcctgatcctgcgggcaagctaaaccagttccggaagaacctgcgggagtcgcagcagctccgatgggatgagagctgggtgcagactgtgctccctttggttatggacacataactcctgggccagaggctaaaaccccrggacccctgctgtccttcccgcagcttcttctyggagtctcagggcaaaccctttcgagcagcrcctcccagtggccagaagctgaaatgacagcagtggtactgcctggtaaaagaattggttctgtgacccgggaagctttggttggccttgatttcttctctggaggcttggaaacgcttcctctcttcttctgttcttcacgccccatgcccctgctagcgtattactgttctgtgacttccctgtgacctctgcagaactcctcatcctgcgtttggtctccaggtgtcccctttctgccgtgttcctaacattttgattcctgtcttgaaaaaagcacctgctgcaccgtaagcccagggatgtggcagctgcagtgggcttggctttgtgaggaactgagtgtgtccacgttgggggaacatcatacttgatacacacgtttttatttgcacaaagaaaatgctrtttttggagccagaattttcatgtctgatttatggtgattttcttaagaaccagaactgctggcagaaagggggcacccacacgcttagatagccgatgtcttattagagggcagtttgtggttcctgatttggaawttaacattctccaaacattccagtccaatgaaagttttatccgctttcccatataaaaattcttcccatgagagtgacttgattctcacaatcccgttggagtcgtgtgtgagtcctacagtgtgaggttcagcattgccatctccaagtgctctycrtagggaaacagtttctggtcatgatgagcttccgcttcccatctgatcccagcccrgcctagctcggtggtgaacasctggcacgtctctgggttgcggacrgtaaaggccaygtagacctcaggagcccgctggtgctcccagcaggcagccagcctccgcaggacsccgaccagsgacaygatggcttctgggcaatacagcacgtctacggtgaaagcttcaggttactgctgtaatgacaacatctggctggaaggccanaactgatggaccgcactacntcccantcca

SEQ ID NO: 536 - DNA, 4090 bp, Homo sapiens
  misc_feature (42): n equals a,t,g, or c
  misc_feature (528): n equals a,t,g, or c
  misc_feature (535): n equals a,t,g, or c
  misc_feature (2475): n equals a,t,g, or c
ccggccacgagaagaaatcagggtgctcagctatctgcaggngtggacccagggcccaagcctgtggcttccagtcagtccagcccgcacctctcccatgggagggcctgaragcgcgggaacatcctgggcccctgggatctcagaggctggaccttcctgggagactcattgagtaagatgcagaggactccttcttgggtggtgggagtccctggtctgctctggggcccctggcttttccccatgagaaaaagcagctggagctgggaagtcccacctggccatcgtgcagaaggtaaacaacgagggtgagggtgaccccttctacgaggtcctgggcctggtcaccctggaggacgtgatcgaggagatcatcaagtcggagatcctggacgagtccgacatgtacactgacaaccgaagccggaagcgggtgtctgagaagaacaagcgtgacttctctgccttcaaggatgcggacaatgagctcaaagtgaaaatctccccgcagctcctcctggccgntcatcgnttcctagccacagaggtctctcagtttagcccctccctgatatcagagaagatcctgctgcggctactcaagtacccagatgtcattcaggaactcaagtttgacgagcacaataagtactacgcccgccattacctgtacacccgaaataagccggccgactacttcatcctcatcctgcaggggaaggtggaggtggaggcagggaaggagaacatgaagtttgagacgggcgccttctcctactatgggactatggccctgacctcggtcccctccgaccgttccccagcacaccccaccccactcagccgctcagcctccctcagttacccagaccgcacagacgtctcaactgcagcaaccttggcaggcagcagcaaccagtttggcagctctgtcctgggccagtacatctctgacttcagcgtccgggcactcgtggacttgcagtacatcaagatcactcggcagcagtaccagaacgggctgctggcttctcgcatggagaacagccctcagtttcccatagacgggtgcaccacccacatggagaacttggccgagaagtctgagctgcctgtggtggacgagaccacaactcttctcaacgagcgtaactccttgctgcacaaagcctcccacgagaatgccatctgacaggagggcccggggccccctgccaccctgcgggggcctycccagtgggcccacatgaagagagggaacctgttagtccagaaaggatacggatagatagcctgtctgactgaacagccagatggcccccagcctatgggggatctggcctctgccagggacctctgagtagctctgaggtggcactgtccagccctggatagggggggcagtgggccagctaccgtaagcaaaggctgttttttactgagagaatttctaaagtaggctcatcacttttttttaaatatcattttgggaagggaagacagggttaaggaactttatttaaaaaaaaaatatttttttcctaaaaactataaaagaggaagggtttcttgtcccgggaagcaacggacataatctgttcccagccatggccttccagcttgtgtccctgattcagggagctctcccttcctcctcctcctcctcctccggaggtgggatcccagagcctgccagtggaggcttatctgttgggaggaagacagctcttcacagaagcaaagaacaaaatggcatggagatcagctgcctgagcacctgcgctgtagcttatctgacaacgctgaggccacgagctcctgggtagctgtgatcagggacatgataatctgagctatgcagaggagcacatctgttgtcaactgctgtacccagaaatctagaactctgccgacagcctctcctggtgagtcgggactcagctgaggacacatccccaccctgcctcccatctggccctttggacaactggccctttgtgacagggctgactcaagtgttaggcagggtctcaggcctttgattgctcacccctgctccccaggccctgccctcacttttaccaaaggttctccctcggcgggagggcatctgtgttggaggtgatttgtctgggttcttccttttggttccagaaggaactgtcagtcatcagcatctgcgttgttagcagtcagtaccacccccgccccacaatgacagtcaaggctgacttgttgactgaagcctttttcccagaccccttatttcgaatccccaagcttcagtccctcttgggggtggagacaagaggacatgtgggaagccacggaagcaggttctttatgtcctctcctctgtggctggcaaggctcacctggccttatccacccacttatggaacctcaggagaggagggctcctcctaaaggcatgcagcttgcagcccctctttctcacacgtgtgatcctancgtgagaggtcatcctgcccttgctgaagttagtactactgtactaagagctctgccctcatgtgaattcctgccctggcgcctcttccctggggctgaatcaggccctgctgcaaaactccaggcttcccagggttggggaggctgtgggaccaargtccatgttggtccttccactgggtgcagcaggagctgggtcccgaragcctggcaggtgaaactctgcaggccttccgcctgattattatttattcactcctttcctcaccccaagtgccctgctctccaggtgcctagagtatcctaactcttaggaccagggattgtcttgcaccaagtatgcctacccctggccagtctgaggtctcctagccatagaactgactcctggaagcctggagagaaggtggtgacacccatgggttctcaactgtaaggaaaaaagacaccagacttttgttccctagtgggggaaagcccttagtcttgtacaggagcagcttgctcccaagtccttttggaagctggcagagctatattcctgacagccctgactgccaggtagagcaaaagacattggtgggggtatgtgaagcaaaaggggcaggtgcacacacctccacagtgacctctgtgcacacggttaccaccaactggctggccctcctcctcttccctggcccattgatcatcccttctcacagagggtcatcattatttccaaatattgtttgtctgatgacttcctcttcccagtgcaatttttcccttcctatttcaacctctggttcctgggatgagccataccctggaactggcccacccactgtgtcttccacgtaagggagacctttgcaaagggcatccaaatgggtaggcaggtgacagccgccgtatttattttgcataatattttaatttgtatatttttgtgatttattttggcgttatgagtttgactctcggggagttttgttgttatgactcttgtgtcttttgtcacaaaacaatgatatttgctaaacgatatatggaatttatttttgattggtaataaaaaatcaaatatgtataaatcctggtgaatctacaacttgcctgtttrttctgtcagtattcagtatgttgttgagataaaagtggctgtggctggctgtctcttgtgatgggacaagggcaataaaggattctaggaccattcagcagtgaaatgcaatcagaaatggaatttctaaatatagtcaaggctgtcgtcacaggagtgagagggacgtggctgctggcagacatacaggacagatgtgctcagctgccataagcatgagtcctgtgaaacagatcccatagsgcccttggcttgtgagtactggaagggcagtgggcttcagcaaattgcccctcctccctacccatgggactgaaagaagcttgatccaaaagtatgagtaatattgttttataacatgcagctgccttttcgtccacacctacaggctagtggtttcaaagttggagtgttcatcccttgaagaacctgagttacgtcactatacccactctcaaagttgcagctctgcaggggactcccatggtgctgtacaggtgctactctgcc

SEQ ID NO: 537 - DNA, 586 bp, Homo sapiens
  misc_feature (56): n equals a,t,g, or c
cgcgggcgcggggccgctacgtgcgcggggagcgcggggagcgcggggagcgcggnggctgcgctcgtgtgcgctcctgggcgctcgccgccgccgctgccgccgcgcgcctttgagtcagcaaactccgcggcccgcaagcccggctcggcccggccctgctctgttctgcccggaggagccgcccattgatcgtgtcctgtgctgaagatgtttccggaacaacagaaagaggaatttgtaagtgtctgggttcgagatcctaggattcagaaggaggacttctggcattcttacattgactatgagatatgtattcatactaatagcatgtgttttacaatgaaaacatcctgtgtacgaagaagatatagagaattcgtgtggctgaggcagagactccaaagtaatgcgttgctggtacaactgccagaacttccatctaaaaacctgtttttcaacatgaacaatcgccagcacgtggatcagcgtcgccagggtctgggaaatttcctcagaaaagtcctacagatgcacttttgctttcagatagcagccttcacctcttccttacagagccatctga

SEQ ID NO: 538 - DNA, 1250 bp, Homo sapiens
aattcggcacgagctctcccttcggcttctctctttcggccggcgccgccagttcctggggcacacccagaggtccccttctcgccgccgcctgcaactgcgagggtagcccggggccgcttggagtcgcccggacctgagaggctgctgcactgggcctcagccagccctccggatgctggtgctgccatccccctgccctcagcctctggcattttcctccgttgagaccatggagggccctccccgtcggacttgccgctccccagaacctggaccttcctcctccatcggatctccccaggcttcatctcctccaaggcccaaccactacctgcttattgacactcagggtgtcccctacacagtgctggtggacgaggagtcacagagggagccaggggccagtggggctccaggccagaaaaagtgctacagctgccccgtgtgctcaagggtcttcgagtacatgtcctaccttcagcgacacagcatcacccactcggaggtaaagcccttcgagtgtgacatctgtgggaaggcattcaagcgcgccagccacttggcacggcaccattccattcacctggcgggtggtgggcggccccacggctgcccgctctgccctcgccgcttccgggatgcgggtgagctggcccagcacagccgggtgcactctggggaacgcccgtttcagtgtccacactgccctcgccgctttatggagcagaacacactgcagaaacacacgcggtggaagcatccatgagccgggctgccgggtgccccaggtaccacaggactttgcagggagcctggactcctgtccagacacctggtgagagcctgaggctggtgttcagggccctggacacagacacagagcagccgcatctcaaargcagagccctgcctgaaggaggaatccgtgagtaatcttcaggtcctccgtgttctggagctgagatgggaatgagcccctacacagaatggagtcctctagcctaaagatatcagctgttccatggcagagccttgactggatggaggtggggagtgtggtgtgtaaagtctctggcctcataaaaggtggctgtgggtcgtcaggaatctgcgccatcttcctggggcttctgcgctgttgttggggaagggaccccagtcctgccttccaccccccaaccaggcctgagactgatcaaacaataaacacgtttcccactctgaaaaaaaaaaaaaaaaaaaaaaaa

SEQ ID NO: 539 - DNA, 1350 bp, Homo sapiens
  misc_feature (1305): n equals a,t,g, or c
  misc_feature (1344): n equals a,t,g, or c
  misc_feature (1349): n equals a,t,g, or c
ggcagagcacatgcgcaccgcagcgggtcgcgcgccctaaggagtggcactttttaaaagtgcagccggagaccagcctacagccgcctgcatctgtatccagcgccaggtcccgccagtcccagctgcgcgcgccccccagtcccgcacccgttcggcccaggctaagttagccctcaccatgccggtcaaaggaggcaccaagtgcatcaaatacctgctgttcggatttaacttcatcttctggcttgccgggattgctgtccttgccattggactatggctccgattcgactctcagaccaagagcatcttcgagcaagaaactaataataataattccagcttctacacaggagtctatattctgatcggagccggcgccctcatgatgctggtgggcttcctgggctgctgcggggctgtgcaggagtcccagtgcatgctgggactgttcttcggcttcctcttggtgatattcgccattgaaatagctgcggccatctggggatattcccacaaggatgaggtgattaaggaagtccaggagttttacaaggacacctacaacaagctgaaaaccaaggatgagccccagcgggaaacgctgaaagccatccactatgcgttgaactgctgtggtttggctgggggcgtggaacagtttatctcagacatctgccccaagaaggacgtactcgaaaccttcaccgtgaagtcctgtcctgatgccatcaaagaggtcttcgacaataaattccacatcatcggcgcagtgggcatcggcattgccgtggtcatgatatttggcatgatcttcagtatgatcttgtgctgtgctatccgcaggaaccgcgagatggtctagagtcagcttacatccctgagcaggaaagtttacccatgaagattggtgggattttttgtttgtttgttttgttttgtttgttgtttgttgtttgtttttttgccactaattttagtattcattctgcattgctagataaaagctgaagttactttatgtttgtcttttaatgcttcattcaatattgacatttgtagttgagcggggggtttggtttgctttggtttatattttttcagttgtttgtttttgcttgttatattaagcagaaatcctgcaatgaaaggtactatatttgctagactctagacaagatattgtacataaaagaatttttttgtctttaaatagatacaaatgtctatcaactttaatcaagttgtaacttatattgaagacaatttgatacataataaaaaattatgacaatgtcctgnaaaaaaaaaaaaaaaaaaagggcggccgccccagagganccccng

SEQ ID NO: 540 - DNA, 2509 bp, Homo sapiens
  misc_feature (3): n equals a,t,g, or c
  misc_feature (38): n equals a,t,g, or c
  misc_feature (367): n equals a,t,g, or c
ccntgctgggaactagtgggtcccccgggctggcaggnaattcgggcasagccggccacagtccaccgcgcggagattctcagcttccccaggagcaagacctctgagcccgccaagcgcggccgcacggcctcggcagcgatggcactgaaggactacgcgctagagaaggaaaaggttaagaagttcttacaagagttctaccaggatgatgaactcgggaagaagcagttcaagtatgggaaccagttggttcggctggctcatcgggaacaggtggctctgtatgtggacctggacgacgtagccgaggatgaccccgagttggtggactcaatttgtgagaatgccaggcgctacgcgaagntctttgctgatgccgtacaagagctgctgcctcagtacaaggagagggaagtggtaaataaagatgtcctggacgtttacattgagcatcggctaatgatggagcagcggagtcgggaccctgggatggtccgaagcccccagaaccagtaccctgctgaactcatgcgcagatttgagctgtattttcaaggccctagcagcaacaagcctcgtgtgatccgggaagtgcgggctgactctgtggggaagttggtaactgtgcgtggaatcgtcactcgtgtctctgaagtcaaacccaagatggtggtggccacttacacttgtgaccagtgtggggcagagacctaccagccgatccagtctcccactttcatgcctctgatcatgtgcccaagccaggagtgccaaaccaaccgctcaggagggcggctgtatctgcagacacggggctccagattcatcaaattccaggagatgaagatgcaagaacatagtgatcaggtgcctgtgggaaatatccctcgtagtatcacggtgctggtagaaggagagaacacaaggattgcccagcctggagaccacgtcagcgtcactggtattttcttgccaatcctgcgcactgggttccgacaggtggtacagggtttactctcagaaacctacctggaagcccatcggattgtgaagatgaacaagagtgaggatgatgagtctggggctggagagctcaccagggaggagctgaggcaaattgcagaggaggatttctacgaaaagctggcagcttcaatcgccccagaaatatacgggcatgaagatgtgaagaaggcactgctgctcctgctagtcgggggtgtggaccagtctcctcgaggcatgaaaatccggggcaacatcaacatctgtctgatgggggatcctggtgtggccaagtctcagctcctgtcatacattgatcgactggcgcctcgcagccagtacacaacaggccggggctcctcaggagtggggcttacggcagctgtgctgagagactccgtgagtggagaactgaccttagagggtggggccctggtgctggctgaccagggtgtgtgctgcattgatgagttcgacaagatggctgaggccgaccgcacagccatccacgaggtcatggagcagcagaccatctccattgccaaggccggcattctcaccacactcaatgcccgctgctccatcctggctgccgccaaccctgcctacgggcgctacaaccctcgccgcagcctggagcagaacatacagctacctgctgcactgctctcccggtttgacctcctctggctgattcaggaccggcccgaccgagacaatgacctacggttggcccagcacatcacctatgtgcaccagcacagccggcagcccccctcccagtttgaacctctggacatgaagctcatgaggcgttacatagccatgtgccgcgagaagcagcccatggtgccagagtctctggctgactacatcacagcagcatacgtggagatgaggcgagaggcttgggctagtaaggatgccacctatacttctgcccggaccctgctggctatcctgcgcctttccactgctctggcacgtctgagaatggtggatgtggtggagaaagaagatgtgaatgaagccatcaggctaatggagatgtcaaaggactctcttctaggagacaaggggcagacagctaggactcagagaccagcagatgtgatatttgccaccgtccgtgaactggtctcagggggccgaagtgtccggttctctgaggcagagcagcgctgtgtatctcgtggcttcacacccgcccagttccaggcggctctggatgaatatgaggagctcaatgtctggcaggtcaatgcttcccggacacggatcacttttgtctgattccagcctgcttgcaaccctggggtcctcttgttccctgctggcctgccccttgggaaggggcagtgatgcctttgaggggaaggaggagcccctctttctcccatgctgcacttactccttttgctaataaaagtgtttgtagattgtcaaaaaaaaaaaaaaaaaaaaaaaaaaaaaaaaaaaaaaaaaaaaaaaaaaaaaggag

SEQ ID NO: 541 - DNA, 1743 bp, Homo sapiens
ggcagaggttgggtcccgcccttgtaggctgtccacctcaaacgggccggacaggatatataagagagaatgcaccgtgcactacacacgcgactcccacaaggttgcagccggagccgcccagctcaccgagagcctagttccggccagggtcgccccggcaaccacgagcccagccaatcagcgccccggactgcaccagagccatggtcggcagaagagcactgatcgtactggctcactcagagaggacgtccttcaactatgccatgaaggaggctgctgcagcggctttgaagaagaaaggatgggaggtggtggagtcggacctctatgccatgaacttcaatcccatcatttccagaaaggacatcacaggtaaactgaaggaccctgcgaactttcagtatcctgccgagtctgttctggcttataaagaaggccatctgagcccagatattgtggctgaacaaaagaagctggaagccgcagaccttgtgatattccagttccccctgcagtggtttggagtccctgccattctgaaaggctggtttgagcgagtgttcataggagagtttgcttacacttacgctgccatgtatgacaaaggacccttccggagtaagaaggcagtgctttccatcaccactggtggcagtggctccatgtactctctgcaagggatccacggggacatgaatgtcattctctggccaattcagagtggcattctgcatttctgtggcttccaagtcttagaacctcaactgacatatagcattgggcacactccagcagacgcccgaattcaaatcctggaaggatggaagaaacgcctggagaatatttgggatgagacaccactgtattttgctccaagcagcctctttgacctaaacttccaggcaggattcttaatgaaaaaagaggtacaggatgaggagaaaaacaagaaatttggcctttctgtgggccatcacttgggcaagtccatcccaactgacaaccagatcaaagctagaaaatgagattccttagcctggatttccttctaacatgttatcaaatctgggtatctttccaggcttccctgacttgctttagtttttaagatttgtgtttttctttttccacaaggaataaatgagagggaatcgactgtattcgtgcatttttggatcatttttaactgattcttatgattactatcatggcatataaccaaaatccgactgggctcaagaggccacttagggaaagatgtagaaagatgctagaaaaatgttctttaaaggcatctacacaatttaattcctctttttagggctaaagttttagggtacagtttggctaggtatcattcaactctccaatgttctattaatcacctctctgtagtttatggcagaagggaattgctcagagaaggaaaagactgaatctacctgccctaagggacttaacttgtttggtagttagccatctaatgcttgtttatgatatttcttgctttcaattacaaagcagttactaatatgcctagcacaagtaccactcttggtcagcttttgttgtttatatacagtacacagataccttgaaaggaagagctaataaatctcttctttgctgcagtcatctactttttttttaattaaaaaaaatttttttttgaacagcttgctctgtacccargctggatgcartgggtgactcggctcactgcaacctctgcctccc

SEQ ID NO: 542 - DNA, 2210 bp, Homo sapiens
  misc_feature (40): n equals a,t,g, or c
cgcgcctgcaggttcgacagtagtggatccaaagaattcngcacgaggctgggtgcagcaaccggagcggcggcgcgtctggaggaggctgcagcagcggaagaccccagtccagatccaggactgagatcccagaaccatgaacctggccatcagcatcgctctcctgctaacagtcttgcaggtctcccgagggcagaaggtgaccagcctaacggcctgcctagtggaccagagccttcgtctggactgccgccatgagaataccagcagttcacccatccagtacgagttcagcctgacccgtgagacaaagaagcacgtgctctttggcactgtgggggtgcctgagcacacataccgctcccgaaccaacttcaccagcaaatacaacatgaaggtcctctacttatccgccttcactagcaaggacgagggcacctacacgtgtgcactccaccactctggccattccccacccatctcctcccagaacgtcacagtgctcagagacaaactggtcaagtgtgagggcatcagcctgctggctcagaacacctcgtggctgctgctgctcctgctctccctctccctcctccaggccacggatttcatgtccctgtgactggtggggcccatggaggagacaggaagcctcaagttccagtgcagagatcctacttctctgagtcagctgaccccctccccscaatccctcaaaccttgaggagaagtggggaccccacccctcatcaggagttccagtgctgcatgcgattatctacccacgtccacgcggccacctcaccctctccgcacacctctggctgtctttttgtactttttgttccagagctgcttctgtctggtttatttaggttttatccttccttttctttgagagttcgtgaagagggaagccaggattggggacctgatggagagtgagagcatgtgaggggtagtgggatggtggggtaccagccactggaggggtcatccttgcccatcgggaccagaaacctgggagagacttggatgaggagtggttgggctgtgcctgggcctagcacggacatggtctgtcctgacagcactcctcggcaggcatggctggtgcctgaagaccccagatgtgagggcaccaccaagaatttgtggcctaccttgtgagggagagaactgagcatctccagcattctcagccacaaccaaaaaaaaataaaaagggcagccctccttaccactgtggaagtccctcagaggccttggggcatgacccagtgaagatgcaggtttgaccaggaaagcagcgctagtggagggttggagaaggaggtaaaggatgagggttcatcatccctccctgcctaaggaagctaaaagcatggccctgctgcccctccctgcctccacccacagtggagagggctacaaaggaggacaagaccctctcaggctgtcccaagctcccaagagcttccagagctctgacccacagcctccaagtcaggtggggtggagtcccagagctgcacagggtttggcccaagtttctaagggaggcacttcctcccctcgcccatcagtgccagcccctgctggctggtgcctgagcccctcagacagccccctgccccgcaggcctgccttctcagggacttctgcggggcctgaggcaagccatggagtgagacccaggagccggacacttctcaggaaatggcttttcccaacccccagcccccacccggtggttcttcctgttctgtgactgtgtatagtgccaccacagcttatggcatctcattgaggacaaagaaaactgcacaataaaaccaagcctctggaatctgtcctcgtgtccacctggccttcgctcctccagcagtgcctgcctgccmcgcttcgctggggtctccacgggtgaggctggggaacgccacctcttcctcttccctgacttctccccaaccacttagtagcaacgctaccccaggggctaatgactgcacactgggcttcttttcagaatgaccctaacgagacacatttgcccaaataaacgaacatcccatgtctgctgactcacctggctggaacaacatgcttactgccaacatgtgggccgaaccacatggccctggctttggaatgcacaagtggctttgcgtgaatttgcgctaagctatgcagtttgaaaaaaaaaa

SEQ ID NO: 543 - DNA, 1715 bp, Homo sapiens
ggcacgagcgcactcccagccggccgcagcctgacacgccgcgcggccccccagtctcccgcggctgctcccccaggcatggcacagggcctcgcctcactatggcagcagcacggcacagcacgctcgacttcatgctcggcgccaaagctgatggtgagaccattctaaaaggcctccagtccattttccaggagcaggggatggcggagtcggtgcacacctggcaggaccatggctatttagcaacctacacaaacaagaacggcagctttgccaatttgagaatttacccacatggattggtgttgctggaccttcagagttatgatggtgatgcgcaaggcaaagaagagatcgacagtattttgaacaaagtagaggaaagaatgaaagaattgagtcaggacagtactgggcgggtgaaacgattaccacccatagtgcgaggaggagccatcgacagatactggcccaccgccgacgggcgcctggttgaatatgacatagatgaagtggtatatgacgaagattcaccttatcaaaatataaaaattctacactcgaagcagtttggaaatattctcatccttagtggggatgttaatttggcagagagtgatttggcatatacccgggccatcatgggcagtggcaaagaagattacactggcaaagatgtactcattctgggaggtggagacggaggcatattgtgtgaaatagtcaaactaaaaccaaagatggtcactatggtagagattgaccaaatggtgattgatgggtgtaagaaatacatgcgaaaaacgtgtggcgatgtcttagacaatcttaaaggagactgctatcaggttctaatagaagactgtatcccggtactgaagaggtacgccaaagaagggagagaatttgattatgtgattaatgatttgacagctgttccaatctccacgtctccagaagaagattccacatgggagtttctcagactgattcttgacctctcaatgaaagtgttgaaacaggatgggaaatattttacacaggggaactgtgtcaatctgacagaagcactgtcgctctatgaagaacagctggggcgcctgtattgtcctgtggaattttcaaaggagatcgtctgtgtcccttcatacttggaattgtgggtattttacactgtttggaagaaagctaaaccctgaagatcagtagcccctaatcacatgtgctgcaaatagccttcctgacctccatatgctgtacatgacatcaaaatgagtcaggcaattgattgtgaattccttaaagttttcctttttttaataattatttttaatttaaaaaagcaaatggaaaatgtatattttgatgagcttagggtgttttttttttgaaagtcagctgaaggatggttagacagcacagcgaagactgctaaatgcactgaccccccccattagaatgtgatttttgttcctttttatttctctgtgggcttttgtttttgtttttgttttggtagatcttcaatttggatatttggaggagtgaacatcgttgttttgctggagggaagatcttgatggtgtttctttccccaaaaattgacttagatattaaaatttggtgcttataagagagagttaaaaaaaaataggattgcttcaattaaaattacaaaagagamaaaaaaaaaaaaaaaagaaagtcgacgc

SEQ ID NO: 544 - DNA, 3109 bp, Homo sapiens
  misc_feature (1011): n equals a,t,g, or c
ggtttgactgcagagatgtggcattcactgtgggcgaaggagaagaccacgacattccaattggaattgacaaagctctggagaaaatgcagcgggaagaacaatgtattttatatcttggaccaagatatggttttggagaggcagggaagcctaaatttggcattgaacctaatgctgagcttatatatgaagttacacttaagagcttcgaaaaggccaaagaatcctgggagatggataccaaagaaaaattggagcaggctgccattgtcaaagagaagggaaccgtatacttcaagggaggcaaatacatgcaggcggtgattcagtatgggaagatagtgtcctggttagagatggaatatggtttatcagaaaaggaatcgaaagcttctgaatcatttctccttgctgcctttctgaacctggccatgtgctacctgaagcttagagaatacaccaaagctgttgaatgctgtgacaaggcccttggactggacagtgccaatgagaaaggcttgtataggaggggtgaagcccagctgctcatgaacgagtttgagtcagccaagggtgactttgagaaagtgctggaagtaaacccccagaataaggctgcaagactgcagatctccatgtgccagaaaaaggccaaggagcacaacgagcgggaccgcagatatacgccaacatgttcaagaagtttgcagagcaggatgccaaggaagaggccaataaagcaatgggcaagaagacttcagaaggggtcactaatgaaaaaggaacagacagtcaagcaatggaagaagagaaacctgagggccacgtatgacgccacgccaaggagggaagagtcccagtgaactcggcccctcctcaatgggctttcccccaactcaggacagaacagtgtttaatgtaaagtttgttatagtctatgtgattctggaagcaaatggcaaaaccagtagcttcccaaaaacagcccccctgctgctgcccggaggnttcactgaggggtggcacgggaccactccaggtggaacaaacagaaatgactgtggtgtggagggagtgagccagcagcttaagtccagctcatttcagtttctatcaaccttcaagtatccaattcagggtccctggagatcatcctaacaatgtggggctgttaggttttacctttgaactttcatagcactgcagaaacctttaaaaaaaaaatgcttcatgaatttctcctttcctacagttgggtagggtaggggaaggaggataagcttttgttttttaaatgactgaagtgctataaatgtagtctgttgcatttttaaccaacagaacccacagtagaggggtctcatgtctccccagttccacagcagtgtcacagacgtgaaagccagaacctcagaggccacttgcttgctgacttagcctcctcccaaagtccccctcctcagccagcctccttgtgagagtggctttctaccacacacagcctgtccctgggggagtaattctgtcattcctaaaacacccttcagcaatgataatgagcagatgagagtttctggattagcttttcctattttcgatgaagttctgagatactgaaatgtgaaaagagcaatcagaattgtgctttttctcccctcctctattccttttagggaataatattcaatacacagtacttcctcccagcattgctactgctcagcttcttctttcattctaatccttgctattaagaatttaagacttgtgcttacaatatttttgacctggagtggatctatttacatagtcatttaggatccatgcagctttttttgtctttttaagattattggctcataagcatatgtatactggtttatggaactttatttacactcctctatcatgcaaaaaaattttgactttttagtactaagcttaatttttaaaaacaaaatctgtagkgttgacaaataaatagttgctcttctacactaggggtttcacctgcaggtttgacacgcagttgctcgcttttcctgccctgtcaagcttctctgttctggcgtgagttgtgaaagagttgaagacagcttcccatgccggtacacagccagtagcctaaatctccagtacttgagctgaccattgaactagggcaagtcttaaatgtgtacatgtagttgaatttcagtccttacgggtaaacagattgagcatggctctctattccctcagcctaagaaacactcatgggaatgcatttggcaacccaaggaaccatttgcttaaacctggaacatctcacctttttaaatcctaaaaaacactggcagttatattttaaattagtttttatttttatgatggttttatcaaaagacttttattattagattgggacccccttcaaacctaaaaatcaagttatttccttttataatacttttcttccccatggaacaaatgggatcaatttgtgagttttttcctttaatgataactaaaatccctctaatttctcatttatgcttttgtcttttttatgaaatatttcttttaaaagccccagtctcacctacgaaatatgaagagcaaaagctgattttgcttacttgctaaactgttgggaaagctctgtagagcatggttccagtgaggccaagattgaaatttgatactaaaaaggccacctagctttttgcagataacaaacaagaaagctattccaagactcagatgatgccagctgtctcccacgtgtgtattatggttcaccagggggaactggcaaaagtgtgtgtggggaggggaagggtgtgtgagtggttctgagcaaataactacagggtgcccattaccactcaagaagacacttcacgtattcttgtatcaaattcaataatcttaaacaatttgtgtagaagtccacagacatctttcaaccaccttttaggctgcatatggattgccaagtcagcatatgaggaattaaagacattgttttttaaaaaaaaaaatcatttagatgcacttttttgtgtgttctttaaataaatccaaaaaaaatgtgaaaaaaaaaaaaaaaaaaagtcgacgcggc

SEQ ID NO: 545 - DNA, 1176 bp, Homo sapiens
cgcctccctataagacaaagcgcggccgacgggctccgagcgcggcccctgggttcgaacacggcacccgcactgcgcgtcatggtgcaggcctggtatatggacgacgccccgggcgacccgcggcaaccccaccgccccgaccccggccgcccagtgggcctggagcagctgcggcggctcggggtgctctactggaagctggatgctgacaaatatgagaatgatccagaattagaaaagatccgaagagagaggaactactcctggatggacatcataaccatatgcaaagataaactaccaaattatgaagaaaagattaagatgttctacgaggagcatttgcacttggacgatgagatccgctacatcctggatggcagtgggtacttcgaygtgagggacaaggaggaccagtggatccggatcttcatggagaagggagacatggtgacgctccccgcggggatctatcaccgcttcacggtggacgagaagaactacacgaaggccatgcggctgtttgtgggagaaccggtgtggacagcgtacaaccggcccgctgaccattttgaagcccgcgggcagtacgtgaaatttctggcacagaccgcctagcagtgctgcctgggaactaacacgtgcctcgtaaaggtccccaatgtaatgactgagcagaaaatcaatcactttctctttgcttttagaggatagccttgaggctagattatctttcctttgtaagattatttgatcagaatattttgtaatgaaaggatctagaaagcaacttggaagtgtaaagagtcaccttcattttctgtaactcaatcaagactggtgggtccatggccctgtgttagttcatgcattcagttgagtcccaaatgaaagtttcatctcccgaaatgcagttccttagatgcccatctggacgtgatgccgcgcctgccrtgtaagaaggtgcaatcctagataacacagctagccagatagaagacacttttttctccaaaatgatgccttggggtggggagtggtagggggaagagctcccaccctaaggggcacacactgagttgcttatgccacttccttgttcaaaataaagtaactgccttaatcttaaaaaaaaaaaaaaaaaaaaaaaaaaaaaaaaaaaaaaaaaaaaaa

SEQ ID NO: 546 - DNA, 1735 bp, Homo sapiens
  misc_feature (10): n equals a,t,g, or c
cttccactgngccgcccactacagcctgcccgacggccgccacggccgcctggacagccccaccttccacctcaccctgcactatcccacggagcacgtgcagttctgggtgggcagcccgtccaccccagcaggctgggtacgcgagggtgacactgtccagctgctctgccggggggacggcagccccagcccggagtatacgcttttccgccttcaggatgagcaggaggaagtgctgaatgtgaatctcgaggggaacttgaccctggagggagtgacccggggccagagcgggacctatggctgcagagtggaggattacgacgcggcagatgacgtgcagctctccaagacgctggagctgcgcgtggcctatctggaccccctggagctcagcgaggggaaggtgctttccttacctctaaacagcagtgcagtcgtgaactgctccgtgcacggcctgcccacccctgccctacgctggaccaaggactccactcccctgggcgatggccccatgctgtcgctcagttctatcaccttcgattccaatggcacctacgtatgtgaggcctccctgcccacagtcccggtcctcagccgcacccagaacttcacgctgctggtccaaggctcgccagagctaaagacagcggaaatagagcccaaggcagatggcagctggagggaaggagacgaagtcacactcatctgctctgcccgcggccatccagaccccaaactcagctggagccaattggggggcagccccgcagagccaatccccggacggcagggttgggtgagcagctctctgaccctgaaagtgaccagcgccctgagccgcgatggcatctcctgtgaagcctccaacccccacgggaacaagcgccatgtcttccacttcggcaccgtgagcccccagacctcccaggctggagtggccgtcatggccgtggccgtcagcgtgggcctcctgctcctcgtcgttgctgtcttctactgcgtgagacgcaaagggggcccctgctgccgccagcggcgggagaagggggctccgccgccaggggagccagggctgagccactcggggtcggagcaaccagagcagaccggccttctcatgggaggtgcctccggaggagccaggggtggcagcgggggcttcggagacgagtgctgagccaagaacctcctagaggctgtccctggacctggagctgcaggcatcagagaaccagccctgctcacgccatgcccgcccccgccttccctcttccctcttccctctccctgcccagccctcccttccttcctctgccggcaaggcagggacccacagtggctgcctgcctccgggagggaaggagagggagggtgggtgggtgggagggggccttcctccagggaatgtgactctcccaggccccagaatagctcctggacccaagcccaaggcccagcctgggacaaggctccgagggtcggctggccggagctatttttacctcccgcctcccctgctggtccccccacctgacgtcttgctgcagagtctgacactggattcccccccctcaccccgcccctggtcccactcctgcccccgccctacctccgccccaccccatcatctgtggacactggagtctggaataaatgctgtttgtcacatcaamaaaaaaaaaaaaaaaattcgrggggggcccggtacccaatttgcaggatggga

SEQ ID NO: 547 - DNA, 1048 bp, Homo sapiens
  misc_feature (1043): n equals a,t,g, or c
acccacgcgtccggcggccgtgtgggtgagttggctgccggtgagttgggtgccggtggagtcgtgttggtcctcagaatccccgcgtascgctgcctcctcctaccctcgccatgtttcttacccggtctgagtacgacaggggcgtgaatactttttctcccgaaggaagattatttcaagtggaatatgccattgaggctatcaagcttggttctacagccattgggatccagacatcagagggtgtgtgcctagctgtggagaagagaattacttccccactgatggagcccagcagcattgagaaaattgtagagattgatgctcacataggttgtgccatgagtgggctaattgctgatgctaagactttaattgataaagccagagtggagacacagaaccactggttcacctacaatgagacaatgacagtggagagtgtgacccaagctgtgtccaatctggctttgcagtttggagaagaagatgcagatccaggtgccatgtctcgtccctttggagtagcattattatttggaggagttgatgagaaaggaccccagctgtttcatatggacccatctgggacctttgtacagtgtgatgctcgagcaattggctctgcttcagagggtgcccagagctccttgcaagaagtttaccacaagtctatgactttgaaagaagccatcaagtcttcactcatcatcctcaaacaagtaatggaggagaagctgaatgcaacaaacattgagctagccacagtgcagcctggccagaatttccacatgttcacaaaggaagaacttgaagaggttatcaaggacatttaaggaatcctgatcctcagaacttctctgggacaatttcagttctaataatgtccttaaattttatttccagctcctgttccttggaaaatctccattgtatgtgcattttttaaatgatgtctgtacataaaggcagttctgaaataaagaaaattttaaaataaaaaaaaaaaaaaaaaactcggggtcgccggtttcgataangcttg

SEQ ID NO: 548 - DNA, 736 bp, Homo sapiens
  misc_feature (719): n equals a,t,g, or c
  misc_feature (724): n equals a,t,g, or c
  misc_feature (727): n equals a,t,g, or c
  misc_feature (734): n equals a,t,g, or c
ctaaaggtaacaaaagctggagctccaccgcggtggcggccgctctagaactagtggatcccccgggctgtttggtttgagcgctcgccgtcttttggcggcagcggcgacgcgagggctcccggccgcccgcgtccgctgggaatctagcttctccaggactgtggtcgccccgtccgctgtggcgggaaagcggcccccagaaccgaccacaccgtggcaagaggacccagaacccgaggacgaaaacttgtatgagaagaacccagactcccatggttatgacaaggaccccgttttggacgtctggaacatgcgacttgtcttcttctttggcgtctccatcatcctggtccttggcagcacctttgtggcctatctgcctgactacaggtgcacagggtgtccaagagcgtgggatgggatgaaagagtggtcccgccgcgaagctgagaggcttgtgaaataccgagaggccaatggccttcccatcatggaatccaactgcttcgaccccagcaagatccagctgccagaggatgagtgaccagttgctaagtggggctcaagaagcaccgccttccccaccccctgcctgccattctgacctcttctcagagcacctaattaaaggggctgaaagtctgaaaaaaaaaaaaaaaaaaaaaaaaaaaaaaaaaaaaaaaaaaaaaaaaaaaaaaaaaaaaaaaaaagggcgncctanttntaaatcncg

SEQ ID NO: 549 - DNA, 2231 bp, Homo sapiens
  misc_feature (2224): n equals a,t,g, or c
ttaaaacaggaactgttggaattattctagctgtaactacctattggctatgtgttgattgaycctagaaagraaaaataatttttcattttagatcttgattgaatttaagatgtatttatatgcctacaaaaggtctgtcttgtaactgttgtataaaataaacctaatctatggtttcatttttaatctaaaaaaagttgtgccttaacaatagggcattgtatgttaataagggaaaacaacctttttagtagatgggggaaaataggaactttttgccattaaaacttaagttcttttgatgtttttaatattatagttgggggagattcattaaaattaaattgaaataaaattatttttgcataacctagcatttacaactaaagtatgttttttataagaactggcatcttgatgtatataggtctgaaataatatttcatcttttgatttttaattttaataatattagaccaggatagatcacagttttacaaatcttagttttaaataaattatttcagtgtgctgttagtcctctacagtcattttggtttaaaaagtgactatttatttatggtagcatatcaataatttattaatgttaaaaaatactgtgtatgacattacmaaccagaacagttcctgggggagaggattctaattgattggcagttctgagagggcaagaagaatggaactttatacttcaaaaggaggttttggttttaccaggtactgcttatgtaaatcgtttatttttatttcatcaaagcctggcaagtatatgcattccaatttaccattggcaaagctttatttatttttaaggttggatgttgaattaattttgtgggaaaatgagatttgtaagtagttttctttctagataagataacataaaccaaactttcagaagttaaggatgatgaataatattgaaatgacttgttatatattgtaagggttcccttaagtatcataattaacaatttgtggaaattgaaaaagcataaactgtgttatttgattagtaatatgttcccttaaaattcattttgaggtgtatgttatacacacagtaaatttttgttcaggaatgacttgctcattctgtgtttttaaaaataggaaataaggcatagtgagtcatcattacatcaattaaccaaaaaatatttcatcccctccgtgcactgaaattatctacttcagccacctttcttattctcgtgttaggagggcacgtttatggactttttaatttccatgtgccatattgtccactaccggcagtagccaaagctagctgtttcagtcccacagaagagacagtgctctgccatgatgacagggcactgctagggctggtttttcttgtttttcccttttggcagtgtggacttcaggaactagatgtatatgcacaagggattgagtttacactaaaactaggaaatggagttttcaatctatgttcttgcctcttcatacttttatttattttttgtcatcctgccttatactgggctaacaatgagataaaataaaaatacctttgaatactcttttccctttcatgcatttaaagccatggaggaactagaccattagctgttgccgtcacatgcttagacaccagtttacttagcgtgttatgaccttcctcacccatactaccaaatttaaatgggtcccgacttcaccctctggaaggaagtaaactcttctctccccatggtttcagagcagtttttacctgcaagcaccatctctgtatgtgctcttactagattatacagttcttgagagggattgcatcttggtgtttttgtatttccacctcacccccagcacatagcccagtctcttgcacaaattaagtacttaatgtgtgttgagctaaattgaataaaggattattagcattagcatattttgtgccttggttgtataagctggttgtttgttttgttacctttgcaaatatttatgattatcacccccccacatactaaattgtttttaaaagttttgcctttccttcagatactaccccaggcaatttgctgtagataatgtgattgcttccaatgacataattatcccaaactctctgccccggatatactttgccaaacgaaatttgaattctctgaataaattggtcatgtctaaaaraaaaaaaaaaaaaaaaaaactcgggggggggcccggnacccaat

SEQ ID NO: 550 - DNA, 1816 bp, Homo sapiens
cccacgcgtccgtagcggcgccggtgagtccgcgtgtggaagtctgtgaggcgcagaggtggggcaggccgtctgrctagctaggcggctgggagcgttttcgtggcggggaacggaggttgaattgccctgcctgggctcatagggaaggaggatgtgaaggagcttgtgaaggcagaggaagattattgaataataaaatacagttttgaaaaaaatggatgaagaacctgaaagaactaagcgatgggaaggaggctatgaaagaacatgggagattcttaaagaagatgaatctggatcacttaaagctacaatagaagacattctattcaaggcaaagagaaaaagagtatttgagcaccatggacaagttcgacttggaatgatgcgccacctttatgtggtagtagatggatcaagaacaatggaagaccaagatttaaagcctaatagactgacgtgtactttaaagttgttggaatactttgtagaggaatattttgatcaaaatcctattagtcagattggaataattgtaactaagagtaaaagagctgaaaaattgactgaactttcaggaaacccaagaaaacatataacgtctttgaagaaagctgtggatatgacctgccatggagagccatctctttataattccctaagcatagctatgcagactctaaaacacatgcctggacatacaagtcgagaagtactaatcatctttagcagccttacaacttgcgatccatctaatatttatgatytaatcaagaccctaaaggcagctaaaattagagtatctgttattggattgtctgcagaagttcgcgtttgcactgtacttgctcgtgaaactggtggcacgtaccatgttattttagatgaaagccattacaaagagttgctcacacatcatgttagtcctcctcctgctagctcaagttctgaatgctcacttattcgtatgggatttcctcagcacaccattgcttctttatctgaccaggatgcaaaaccctctttcagcatggcgcatttggatggcaatactgagccagggcttacattaggaggctatttctgcccacagtgtcgggcaaagtactgtgagctacctgttgaatgtaaaatctgtggtcttactttggtgtctgctccccacttggcacggtcttaccatcatttgtttcctttggatgcttttcaagaaattcccctagaagaatataatggagaaagattttgttatggatgtcagggggaattgaaagaccaacatgtttatgtttgtgctgtgtgccaaaatgttttctgtgtggactgtgatgtttttgttcatgattctctacactgttgccctggctgtattcataagattccagctccttcaggtgtttgattccagcatgtagtatacattgtatgtgttaaaaagaaatttgcaactgtgaataaaaggacttctttagaagaagcttcatttaaaacatgaaaggataatctgacttaagaaactttttgctaagaaaaggtaatattttattaaattttaaatttgtgttgtcacagaaatacctgaaattcagtagtacttcattcaattaattttgttttctattattttgagttatactgttttcaaagtcattatgcagtatgtataaacttataagaattaaattgatgtgataattttatgtttttataattaaatatagaatctttatgatttatgttaattcattaatttagtgtaagaagaaagttaagtctgaatgtaaattcagtgtaagatgaaaatttatcaata

SEQ ID NO: 551 - DNA, 2610 bp, Homo sapiens
gcctgaaggactgcctcgtttcaacaacaactttatggctcccggaagtgcctcctccccgtccccttcctttccagcctcacgcccgtgggctgcagttggaacgatggcggcggcagctgccgccgggcctagcccggggtctggacctggggactccccagaagggcccgagggggaggctccggagcgtcggcggaaggcgcacgggatgctgaagctttactacggcctctcggaaggggaggcggcgggacgccccgcggggcccgaccccctggacccgactgatctgaacggggcgcacttcgacccggaagtttacctagacaagctgcgtagagagtgccctctggcccagttgatggacagtgagacggacatggtgcggcagatccgggctctagacagcgacatgcagaccctggtctatgagaactacaacaagttcatctcagccacagacaccatccggaagatgaagaacgatttccggaagatggaggatgagatggaccggctggccaccaacatggcagtgatcaccgacttcagcgctcgcatcagcgccacgctgcaggaccgccacgagcgcatcaccaagctggcaggggtccacgcgctgctgcggaagctgcagttcctctttgagctgccctcgcgcctcaccaagtgcgtggaactgggcgcctatgggcaggcggtgcgctaccagggccgcgcgcaggccgtgctgcagcagtaccaacacctgccctcgttccgcgccatccaggacgactgccaggtcatcacggcccgcctggcccagcagctgcggcagcgctttagggagggcggctcaggcgccccggagcaggcagagtgcgtggagctgctgctggccctgggcgagcctgcggaggagctgtgcgaggagttctggcgcacgcccgcggccggctggagaaggagctgagaaacctggaggccgagctggggccctcacctccggctcccgacgtgttagagttcaccgaccatggaggcagtggcttcgtgggcggcctctgccaggtggcggcggcctaccaggagctgtttgcggcccagggcccagcaggtgccgagaagctggcggccttcgcccggcagctgggcarccgctattttgcgctggtggagcggcggctggcgcaggagcagggtggtggtgacaactcactgctggtgcgggcgctggaccgyttccaccggcgcttgcgggctcccggggccctgctggccgctgccgggctcgcagacgctgccacggagatcgtggaacgagtggcccgcgagcgcctgggccaccacctgcagggtctccgggcggccttcctgggctgcctgacagacgtccgccaggcgctggcagcacctcgcgtggctgggaaggagggccctggcctggccgagttgctggccaatgtggccagctccatcctgagccacattaaggcctctctggcagcagtgcaccttttcaccgccaaagaggtgtccttctccaacaagccctacttccggggtgagttctgcagtcagggtgtccgtgagggcctcatcgtgggcttcgtccactctatgtgccagacggctcagagcttctgcgacagccctggggagaaggggggtgccacaccacctgccctgctcctgctgctctcccgcctctgcctggactacgagacggccaccatctcctacatcctcactctcactgatgaacagtttctggtgcaggatcagttcccagtgacgcccgtgagcacgctgtgtgcagaggccagggaaacggcgcggcggctgctgacccactacgtgaaggtgcagggcctggtcatatcacagatgctgcgcaagagcgtggagactcgcgactggctcagcactctggagccccggaatgtgcgggccgtcatgaagcgggtggtggaggataccaccgccatcgacgtgcaggtggggctcctgtacgaagagggtgttcgcaaggcccagagcagcgactccagcaagaggactttctccgtgtacagcagctctcggcagcagggccgctacgcccccagctatacccccagtgccccgatggacaccaacctcttgagcaatatccagaagctattctctgaacgtattgatgtgttcagccctgtggagttcaacaaggtgtcggtgctgaccggcatcatcaagatcagcctgaagacgctgctggagtgtgtgcggctgcgcacctttgggcgcttcgggctgcagcaggtgcaagtggactgccactttctgcagctctacctgtggcgttttgtggccgacgaagaactcgtgcacttgctgctggacgaagtggtggcctctgctgccctgcgctgcccagaccctgtgcccatggagcccagtgtggttgaggtcatctgcgagcgcggctaggcgcagccgctgccatgcaccggtctgtccctgcaccccatggcacccaggatctggtctcggtggtccttccccgcaggcaggtgtcaggaccggcctaataaacatgtgtggcctcctcaaaaaaaaaaaaaaaaaaaaaaaaaaaaaaaaaaa

SEQ ID NO: 552 - DNA, 4021 bp, Homo sapiens
  misc_feature (4000): n equals a,t,g, or c
attttcttttcccctctcatcagagcccttccagggctcctacaaggtggtggtacagaagaaatcaggtggaaggacagagcaccctttcaccgtggaggaatttgttcttcccaagtttgaagtacaagtaacagtgccaaagataatcaccatcttggaagaagagatgaatgtatcagtgtgtggcctatacacatatgggaagcctgtccctggacatgtgactgtgagcatttgcagaaagtatagtgacgcttccgactgccacggtgaagattcacaggctttctgtgagaaattcagtggacagctaaacagccatggctgcttctatcagcaagtaaaaaccaaggtcttccagctgaagaggaaggagtatgaaatgaaacttcacactgaggcccagatccaagaagaaggaacagtggtggaattgactggaaggcagtccagtgaaatcacaagaaccataaccaaactctcatttgtgaaagtggactcacactttcgacagggaattcccttctttgggcaggtgcgcctagtagatgggaaaggcgtccctataccaaataaagtcatattcatcagaggaaatgaagcaaactattactccaatgctaccacggatgagcatggccttgtacagttctctatcaacaccaccaatgttatgggtacctctcttactgttagggtcaattacaaggatcgtagtccctgttacggctaccagtgggtgtcagaagaacacgaagaggcacatcacactgcttatcttgtgttctccccaagcaagagctttgtccaccttgagcccatgtctcatgaactaccctgtggccatactcagacagtccaggcacattatattctgaatggaggcaccctgctggggctgaagaagctctccttctattatctgataatggcaaagggaggcattgtccgaactgggactcatggactgcttgtgaagcaggaagacatgaagggccatttttccatctcaatccctgtgaagtcagacattgctcctgtcgctcggttgctcatctatgctgttttacctaccggggacgtgattggggattctgcaaaatatgatgttgaaaattgtctggccaacaaggtggatttgagcttcagcccatcacaaagtctcccagcctcacacgcccacctgcgagtcacagcggctcctcagtccgtctgcgccctccgtgctgtggaccaaagcgtgctgctcatgaagcctgatgctgagctctcggcgtcctcggtttacaacctgctaccagaaaaggacctcactggcttccctgggcctttgaatgaccaggacgatgaagactgcatcaatcgtcataatgtctatattaatggaatcacatatactccagtatcaagtacaaatgaaaaggatatgtacagcttcctagaggacatgggcttaaaggcattcaccaactcaaagattcgtaaacccaaaatgtgtccacagcttcaacagtatgaaatgcatggacctgaaggtctacgtgtaggtttttatgagtcagatgtaatgggaagaggccatgcacgcctggtgcatgttgaagagcctcacacggagaccgtacgaaagtacttccctgagacatggatctgggatttggtggtggtaaactcagcaggtgtggctgaggtaggagtaacagtccctgacaccatcaccgagtggaaggcaggggccttctgcctgtctgaagatgctggacttggtatctcttccactgcctctctccgagccttccagcccttctttgtggagctcacaatgccttactctgtgattcgtggagaggccttcacactcaaggccacggtcctaaactaccttcccaaatgcatccgggtcagtgtgcagctggaagcctctcccgccttcctagctgtcccagtggagaaggaacaagcgcctcactgcatctgtgcaaacgggcggcaaactgtgtcctgggcagtaaccccaaagtcattaggaaatgtgaatttcactgtgagcgcagaggcactagagtctcaagagctgtgtgggactgaggtgccttcagttcctgaacacggaaggaaagacacagtcatcaagcctctgttggttgaacctgaaggactagagaaggaaacaacattcaactccctactttgtccatcaggtggtgaggtttctgaagaattatccctgaaactgccaccaaatgtggtagaagaatctgcccgagcttctgtctcagttttgggagacatattaggctctgccatgcaaaacacacaaaatcttctccagatgccctatggctgtggagagcagaatatggtcctctttgctcctaacatctatgtactggattatctaaatgaaacacagcagcttactccagagatcaagtccaaggccattggctatctcaacactggttaccagagacagttgaactacaaacactatgatggctcctacagcacctttggggagcgatatggcaggaaccagggcaacacctggctcacagcctttgttctgaagacttttgcccaagctcgagcctacatcttcatcgatgaagcacacattacccaagccctcatatggctctcccagaggcagaaggacaatggctgtttcaggagctctgggtcactgctcaacaatgccataaagggaggagtagaagatgaagtgaccctctccgcctatatcaccatcgcccttctggagattcctctcacagtcactcaccctgttgtccgcaatgccctgttttgcctggagtcagcctggaagacagcacaagaaggggaccatggcagccatgtatataccaaagcactgctggcctatgcttttgccctggcaggtaaccaggacaagaggaaggaagtactcaagtcacttaatgaggaagctgtgaagaaagacaactctgtccattgggagcgccctcagaaacccaaggcaccagtggggcatttttacgaaccccaggctccctctgctgaggtggagatgacatcctatgtgctcctcgcttatctcacggcccagccagccccaacctcggaggacctgacctctgcaaccaacatcgtgaagtggatcacgaagcagcagaatgcccagggcggtttctcctccacccaggacacagtggtggctctccatgctctgtccaaatatggagcagccacatttaccaggactgggaaggctgcacaggtgactatccagtcttcagggacattttccagcaaattccaagtggacaacaacaaccgcctgttactgcagcaggtctcattgccagagctgcctggggaatacagcatgaaagtgacaggagaaggatgtgtctacctccagacatccttgaaatacaatattctcccagaaaaggaagagttcccctttgctttaggagtgcagactctgcctcaaacttgtgatgaacccaaagcccacaccagcttccaaatctccctaagtgtcagttacacagggagccgctctgcctccaacatggcgatcgttgatgtgaagatggtctctggcttcattcccctgaagccaacagtgaaaatgcttgaaagatctaaccatgtgagccggacagaagtcagcagcaaccatgtcttgatttaccttgataaggtgtcaaatcagacactgagcttgttcttcacggttctgcaagatgtcccagtaagagatctgaaaccagccatagtgaaagtctatgattactacgagacggatgagtttgcaattgctgagtacaatgctccttgcagcaaagatcttggaaatgcttgaagaccacaaggctgaaaagtgctttgctggagtcctgttctcagagctccacagaagacacgtgtttttgtatctttaaagacttgatgaataaacactttttctggtcaaaaaaaaaaaaaaaaaaaaaaaaaaaaaaanggggggggcccggaacccaat

SEQ ID NO: 553 - DNA, 1780 bp, Homo sapiens
tgtttttgaggtgctcaattggaataaaaatattccaatctatttggagaccaaaggcaaaatcrgttttcttacctttggaattattcgtaccttttatggtaaatttcagctttgacatgtattatgaggaacgtaccaaaaaccggtttgtaacaaatctgtagagaaggtctgaatctatcgtgtttgccttttcaggtgccatttctactgcctaatacagtgccatttgccttgtgaagacccataaacattcattgtgttgaatgtaagatagagactctccctagtcttactgatctcagtaccccacaaatgattaagaatgatatgaaaaccagcagctaaggaacatcttattatttagttgtagcatattcataacaagtgtccttcaaggataaacatatattctctatttgtatttagcaagtaaaacttgtgttgacctttagtgcattatattcagcttttaacagtattatgtatgtactggaaagcaaagaaatcttagagtcttggacattgtttatttgtgcaacaactagaaaggagcaatgaagtttatttcagttgtatttttccctaagcacaatctgcaatagtttatgtatgacagagataattcaaaaaggaaaactatatataaaagttgtatataaagtttgtctctgaaatatttctttgaagtttttaaaaaattgactcatgtttaaaaacaaaaacacatattcagagcattggacttttttaacttgttttcatctgtttatcatgacttttttatttctggtgtagagtccacattatttagtttgttgtacttttaaatttcaaagttcaaatctgaagaattagcgtttgtgatttcgggataccatgcagtggttttaatcccaggaaaaaaactatcaacaaaagttcgtttgattctcattatgtaactttgtagaaccatcctttctagatgggtccaccacagtgaatttgtaactttgaagtcaggatagaatatcattagattatctgtgagatagcattactatgttaggaccagcagagtttgggttggtaaaaataatgtttgctctattactgggttacagacatttcagcatttttaggttggttttaaatcactaaaaatatttattcggatttgaaggatttaagtgctaaaaatcaatccatttcttgcccttcaataattgtccatgcctgccttttgttgtttacatgctcttctgcccagactgttagtaatctagggaccccctttggagctgataagtacagttcagccttttctcctcaaatatataatgactttaacattcctaagaatataggtatttctgaatgatttaaatttgaggaattttaatacataaaatacaatgtacaaactttctgcccactcagatctcttctccatcatgtacttagtatttcccattaacctacacactgatttttatgctactccttgtagaaacaaaattctggtttgactcagtttttgtgtttataaacttttggaatgtgtaccccgtttatgtgaagaattatgacctatcagtcatagctaaatagtgaacctcaaaagtgttaacttttgactattcatgtgaggtttggtatcttgcatttatgtacatggctgtaaattatgtgcatttactctgtatttatgttatctagctgacttttacttgaattgttcaaattttaaaaattaaaatacgctcatgaaaatatggctttttctgtaaaaaaa

SEQ ID NO: 554 - DNA, 3713 bp, Homo sapiens
  misc_feature (4): n equals a,t,g, or c
  misc_feature (3006): n equals a,t,g, or c
ccgnacgcgtgggattcacggcgaaatgagactgttcgtgagtgatggcgtcccgggttgcttgccggtgctggccgccgccgggagagcccggggcagagcagaggtgctcatcagcactgtaggcccggaagattgtgtggtcccgttcctgacccggcctaaggtccctgtcttgcagctggatagcggcaactacctcttctccactagtgcaatctgccgatatttttttttgttatctggctgggagcaagatgacctcactaaccagtggctggaatgggaagcgacagagctgcagccagctttgtctgctgccctgtactatttagtggtccaaggcaagaagggggaagatgttcttggttcagtgcggagagccctgactcacattgaccacagcttgagtcgtcagaactgtcctttcctggctggggagacagaatctctagccgacattgttttgtggggagccctatacccattactgcaagatcccgcctacctccctgaggagctgagtgccctgcacagctggttccagacactgagtacccaggaaccatgtcagcgagctgcagagactgtactgaaacagcaaggtgtcctggctctccggccttacctccaaaagcagccccagcccagccccgctgagggaagggctgtcaccaatgagcctgaggaggaggagctggctaccctatctgaggaggagattgctatggctgttactgcttgggagaagggcctagaaagtttgcccccgctgcggccccagcagaatccagtgttgcctgtggctggagaaaggaatgtgctcatcaccagtgccctcccttacgtcaacaatgtcccccaccttgggaacatcattggttgtgtgctcagtgccgatgtctttgccaggtactctcgcctccgccagtggaacaccctctatctgtgtgggacagatgagtatggtacagcaacagagaccaaggctctggaggagggactaaccccccaggagatctgcgacaagtaccacatcatccatgctgacatctaccgctggtttaacatttcgtttgatatttttggtcgcaccaccactccacagcagaccaaaatcacccaggacattttccagcagttgctgaaacgaggttttgtgctgcaagatactgtggagcaactgcgatgtgagcactgtgctcgcttcctggctgaccgcttcgtggagggcgtgtgtcccttctgtggctatgaggaggctcggggtgaccagtgtgacaagtgtggcaagctcatcaatgctgtcgagcttaagaagcctcagtgtaaagtctgccgatcatgccctgtggtgcagtcgagccagcacctgtttctggacctgcctaagctggagaagcgactggaggagtggttggggaggacattgcctggcagtgactggacacccaatgcccagtttatcacccgttcttggcttcgggatggcctcaagccacgctgcataacccgagacctcaaatggggaacccctgtacccttagaaggttttgaagacaaggtattctatgtctggtttgatgccactattggctatctgtccatcacagccaactacacagaccagtgggagagatggtggaagaacccagagcaagtggacctgtatcagttcatggccaaagacaatgttcctttccatagcttagtctttccttgctcagccctaggagctgaggataactataccttggtcagccacctcattgctacagagtacctgaactatgaggatgggaaattctctaagagccgcggtgtgggagtgtttggggacatggcccaggacacggggatccctgctgacatctggcgcttctatctgctgtacattcggcctgagggccaggacagtgctttctcctggacggacctgctgctgaagaataattctgagctgcttaacaacctgggcaacttcatcaacagagctgggatgtttgtgtctaagttctttgggggctatgtgcctgagatggtgctcacccctgatgatcagcgcctgctggcccatgtcaccctggagctccagcactatcaccagctacttgagaaggttcggatccgggatgccttgcgcagtatcctcaccatatctcgacatggcaaccaatatattcaggtgaatgagccctggaagcggattaaaggcagtgaggctgacaggcaacgggcaggaacagtgactggcttggcagtgaatatagctgccttgctctctgtcatgcttcagccttacatgcccacggttagtgccacaatccaggcccagctgcagctcccacctccagcctgcagtatcctgctgacaaacttcctgtgtaccttaccagcaggacaccagattggcacagtcagtcccttgttccaaaaattggaaaatgaccagattgaaagtttaaggcagcgctttggagggggccaggcaaaaacgtccccgaagccagcagttgtagagactgttacaacagccaagccacagcagatacaagcgctgatggatgaagtgacaaaacaaggaaacattgtccgagaactgaaagcacaaaaggcagacaagaacgaggttgctgcggaggtggcgaaactcttggatctaaagaaacagttggctgtagctgagggaaaccccctgaagcccctaaaggcaagaagaaaaagtaaaagaccttggctcatagaaagtcactttaatagatagggacagtaataaataaatgtacaatctctatatacaagctgagacctttccttttgtctactccaagccttccccctgcgtatgtgggattgagggtcacatcattggcactagtgagagggtagtcagtagccacttctgggaaaggtgggtagtgtggcccaagtgggggactgatgctcccaattgttcatgcttggtgcagattcaccattcggtcaatcagagctcggcgagtcgcntctacttccctggtcaggcgctcgatttcctgcttgagccgttcattctcttcagctagctgtgccactttcctttcattctcctgttctttctccttcatgcgctgctttccagcccgggctggggaatgaccactctgtttccgtttcctggttctcccttggtcttcctcctcttcctcctgagccagggagctctgactggaatctggagagtgagggctctgggaggtgcttgtgacctctgctggttctggctcctcctcagtcagccaagccagagaagcagggtcaagagtggtgaagatttttgattcttcctcttcatttccaggaggtgaaacataggtacccccattttcatctgaagacaggacctcttgcaggtcctcataccaggcttccagctcccagctggacagtgtcccgaaggagaaaggcaatgactcagctgccatctctgcagttggatcagtctggaaaagcacatctgcaggataatggggagtggctggaacaagctccatgtagcaaacagtctatgccacaagttggcaagctggtctgatgcctgctttcaggtgtggtgatgtatgaagatacacttccttcttgaacactctctcctcaggttccagctctgattttggctctgtcgctgccacccgctcatctttaacatgatacgctcagtccctgtgccgaat

SEQ ID NO: 555 - DNA, 1997 bp, Homo sapiens
  misc_feature (1887): n equals a,t,g, or c
  misc_feature (1951): n equals a,t,g, or c
  misc_feature (1980): n equals a,t,g, or c
  misc_feature (1992): n equals a,t,g, or c
ggaaccggcgccgcgcttgctgctggtaacagggccttgcctagtgggccttccttcccaggtcgcccctcagtctccactagagacaggactgaccagttgctcttccttccaagaaccttcgagatctgcggtctggggtctggttgaaagatggcggccctcactaccctgtttaagtacatagatgaaaatcaggatcgctacattaagaaactcgcaaaatgggtggctatccagagtgtgtctgcgtggccggagaagagaggcgaaatcaggaggatgatggaagttgctgctgcagatgttaagcagttggggggctctgtggaactggtggatatcggaaaacaaaagctccctgatggctcggagatcccgctccctcctattctgctcggcaggctgggctccgacccacagaagaagaccgtgtgcatttacgggcacctggatgtgcagcctgcagccctggaggacggctgggacagcgagcccttcaccctggtggagcgagacggcaagctgyatgggagaggttcgactgatgataagggcccggtggccggctggataaacgccctggaagcgtatcagaaaacaggccaggagattcctgtcaacgtccgattctgcctcgaaggcatggaggagtcaggctctgagggcctagacgagctgatttttgcccggaaagacacattctttaaggatgtggactaygtctgcatttctgacaattactggctgggaaagaagaagccctgcatcacctacggcctcaggggcatttgctactttttcatcgaggtggagtgcagcaacaaagacctccattctggggtgtacgggggctcggtgcatgaggccatgactgatctcattttgctgatgggctctttggtggacaagagggggaacatcctgatccccggcattaacgaggccgtggccgccgtcacggaagaggagcacaagctgtacgacgacatcgactttgacatagaggagtttgccaaggatgtgggggcgcagatcctcctgcacagccacaagaaagacatcctcatgcaccgatggcggtacccgtctctgtccctccatggcatcgaaggcgccttctctgggtctggggccaagaccgtgattcccaggaaggtggttggcaagttctccatcaggctcgtgccgaacatgactcctgaagtcgtcggcgagcaggtcacaagctacctaactaagaagtttgctgaactacgcagccccaatgagttcaaggtgtacatgggccacggtgggaagccctgggtctccgacttcagtcaccctcattacctggctgggagaagagccatgaagacagtttttggtgttgagccagacttgaccagggaaggcggcagtattcccgtgaccttgacctttcaggaggccacgggcaagaacgtcatgctgctgcctgtggggtcagcggatgacggagcccactcccagaatgaaaagctcaacaggtataactacatagagggaaccaagatgctggccgcgtacctgtatgaggtctcccagctgaaggactaggccaagccctctgtgtgccatctccaatgagaaggaatcctgccctcacctcacccttttccaacttgcccagggaagtggaggttccctctttcctttccctcttgtcaggtcatccatgactttagagaacagacacaagtgtatccagctgtccacgggtggagctacccgttgggcttatgagtgacctggagtgacagctgagtcaccctgggtaagttctcagagtggtcaggatggcttgacctgcagaagatacccaaggtccaaaagcacaaggtctgcgggaaagttctggttgtncggctggggcaccacgggttcacamctatwaatcgaggcatttttggggagggccaagacaggngggtycatttttagggccagggrttyttnaggacaaaggcntaggg

SEQ ID NO: 556 - DNA, 906 bp, Homo sapiens
  misc_feature (12): n equals a,t,g, or c
  misc_feature (879): n equals a,t,g, or c
  misc_feature (906): n equals a,t,g, or c
tcttcatctgtnacccacatccatttcttcatcttcgtcttgctctgtgtcttctgtggtgtctcagcgcctgacagaatctccgtgtgctttggtggccagccagtacggatggtctggcaacatggagagaatcatgaaagcacaagcgtaccaaacgggcaaggacatctctacaaattactatgcgagtcagaagaaaacatttgaaattaatcccagacacccgctgatcagagacatgcttcgacgaattaaggaagatgaagatgataaaacagttttggatcttgctgtggttttgtttgaaacagcaacgcttcggtcagggtatcttttaccagacactaaagcatatggagatagaatagaaagaatgcttcgcctcagtttgaacattgaccctgatgcaaaggtggaagaagagcccgaagaagaacctgaagagacagcagaagacacaacagaagacacagagcaagacgaagatgaagaaatggatgtgggaacagatgaagaagaagaaacagcaaaggaatctacagctgaaaaagatgaattgtaaattatactctcaccatttggatcctgtgtggagagggaatgtgaaatttacatcatttctttttgggagagacttgttttggatgccccctaatccccttctcccctgcactgtaaaatgtgggattatgggtcacaggaaaaagtgggttttttagttgaattttttttaacattcctcatgaatgtaaatttgtactatttaactgactattcttgatgtaaaatcttgtcatgtgtataaaaataaaaaagatcccaaataaaaaaaaaaaaaaaaaaaaaaaaaaaaaaaaaaaaaaaaaaaaaaaaaancccccggggggggcccccccccccctn

SEQ ID NO: 557 - DNA, 3484 bp, Homo sapiens
gggtatttgcaaatatgtagtttaattgtattattgaactctcattttgggggcttgggcacattaacagattaatccatctgtatagggcttttgctgttggatagaatttaaattgtctacataaatatttgttttaggacccttagattttatctgaatacacagattaggctttaaaaacagatatatatgtcatttttggcttaaggagtttggctaagttagcttttcaactggcactgtatggcagcattttttggtatggttagcatggcacatggcgaaacataaagcattttactgtacaggtaaggaatgtgccatgttgttttacctatctctctttctctctcactcccatgcacacatcctgtgtgtattcagagaccttcagaaacattcatattcattttcatgagtcagcaaaagccctacgcttgattccaacagaatatttcctttacatactttcttctcttaatttttacaaaatttgtatggtaggtgtaaaagaaaatcatagtaactgtaccatattattaacccctaaatcaaactttttttgkcttgtgkatcttgatttttctgtgtgctttatagtgaagcagccgacacgagtcgttgttcataaaacagcttttgaaagttgagagcacacccctggagaaccgactgtgcttgcttacgtttggttcatgacttaaaaatcgagtacaggagttattcctgatgaagctaaagctttgtctctgttggcaccagctaatgcagtggcaggtcttctgcctggtggtggactcctgcctactcctaacccacttacccagattggcgctgttccactggctgctttgggggctcctactcttgatcctgcccttgctgcacttgggcttcctggagcaaacttgaactctcagtctcttgctgcagatcagttgctgaagcttatgagtactgttgatcccaagttgaatcatgtagctgctggtctcgtttcaccaagtctgaaatcggatacctctagtaaagaaatagaggaagctatgaaaagagtacgagaagcacagtccctaatttctgctgctatagaaccagataagaaagaagaaaaaagaaggcattcaagatcaagatcacgttctaggaggaggaggactccctcatcttctagacacaggcggtcaagaagcagatcgagacggcggtcacattctaagtctaggagtcggcgacgatccaaaagcccaaggcggagaagatctcattccagagaaagaggtagaaggtcaaggagcacatcaaaaacaagagacaaaaagaaagaagacaaagaaaagaaacgttctaaaacaccaccaaaaagttacagcacagccagacgttctagaagtgcaagcagagagagacgacgacgaagaagcaggagtggcacaagatctcctaaaaagcctcggtctcctaaaagaaaattgtcccgctcaccatcccctaggagacataaaaaggagaagaagaaagataaagacaaagaaagaagtagggatgaaagagaacgatcaacaagcaagaagaagaagagtaaagataaggaaaaggaccgggaaagaaaatcagagagtgataaagatgtaaaacaggttacacgggattatgatgaagaggaacaggggtatgacagtgagaaagagaaaaaagaagagaagaaaccaatagaaacaggttcccctaaaacaaaggaatgttctgtggaaaagggaactggtgattcactaagagaatccaaagtgaatggggatgatcatcatgaagaagacatggatatgagtgactgaatattgcctctgagggagtccaactgtatacctgcatcagtgtcattcctttgtgtgatttcttaatgctgtatttgttcatctcaaacctagatgtatacagctctgagttataaatggttataaagctcctgttactcatattagttatttacatcaaaaagcttttagaaaatggtacgaggtaaccaattcttgtcatggtgaaatctgattgagtaaccaagcagttttactattctggtgctgcttcataacaaaaatgaaaagctgcatgcatctacagcaggcatggattgtttatgtcgtatgatatcctttattaagtaagttcacttatagtatttctataatttgattcattgccgtaatagagccatgtaggaaatgcactgattgcatgttattgtggcaagaatatcctaaatgtcattaaaatcctccaacatgatggatctacttatggtcttgtttgttgacatgacaaattaacattcttatagttacatctggaaatgagcatttgaaatagataatcctttaagccttgtggcaaaatttttgtggcttttgtttaactttgaaaggttattatgcactaaccttttttggtggctaattagggtttaaatacagaaacaagatttcaaataaaactgtctttggcagtgagtaaatagcatattttgaagtagagttgtatactttttcataagatgtttgggaatttttttcctgaagtaataatttattccacatctacatcagtgaaagctatctacctatcctgagtctatcttaaaggaaaaaaagaaaaaaaccttatctcttgcccttattttgaattttccactctttcattaatttgttttaagctccgtgttggaaaaaaggggtagtgcattttaaattgaccttcatacgcttttaaaataagacaaatctacttgataatgtacctttatttgatctcaagttgtataaaaccaataaatttgtgttactgcagtagtaatcttatgcacacggtgatttcatgttatatatgcaaagtaggcaactgttttcttagttacagaagtttcaagcttcacttttgtgcagtagaaacaaaagtaggctacagtctgtgccatgttgatgtacagtttctgaaattgttttacaagactttgataataaaacccttaaacttatgttcatgttcctgtaaaaccgtatttgtatttatttacgctactgaatgtatgacatttacctcattcattttacaaattctttccctttctgtccacatatttcagtatagtaaaaagaggaagtctatcactgtagtgataattgccatcaaaattgtcaaaaatgatttaatttctatccaaaatagtccttttcttagcttagtatcattttattgcttattttttgtgtgggaatggggttggataaagcaatgaactttagtataaacaaatcccacctatatctagcaaatttatattttcggtgaaatacagatatttgcctttctggagtagtatagaagctgtcaatatgtatctactgtacctgcccgggcggccgctcgaaattccagcacactggcggccgttrctagggatccgagcgaggtatcccatagaagt

SEQ ID NO: 558 - DNA, 790 bp, Homo sapiens
  misc_feature (1): n equals a,t,g, or c
  misc_feature (9): n equals a,t,g, or c
  misc_feature (788): n equals a,t,g, or c
ngcacaggnaaaggaggtgaaatcgtctcgactcctggggtccgtgtgctctggtagaagtgggcgacagtggctcaatttctgatcagcagcttgcagcctagatgatggcagccaaaggaaagacttggccagcgaggctccctaccactccgaaaaaagagagtgggggtcagcagggtctgctctgctctggggattaaggggctgactagaaggatttgagtctttccttctgtccactgccacagggttcttggagtaactgcaggtttaaactgcaggtctaacttccagaggctggggttccctgccccccagcttagagacattcctgargtggctgaagagcaggaaggagaatgaatgcacttccagactggcccagagtctcagcccctcctcttccttgtttcccgctggtccctctgggctgtacggcccggatggaggcctgaggaaaatgagggggctttggttctccggaattccggccggggccacaccctcctgtcttcagatggttcatgtacccatccccccttcccgtcctctcctttgtctcctctgtcaccgggactcccagcagagatttttttttgtactggctgtgtaacaggacaccgcatgcagccctcaggaggggctctgtgcttctratgaaaaaggmaggcattgacctccctctgaggcagtttccaggcccaccgtggtgcacgcaaaccacttcctggccatgcgctccctcctgcttctcagcgccttctgcctcctggaggcggccctcncg

SEQ ID NO: 559 - DNA, 558 bp, Homo sapiens
tacgtctcactcgggacctgcaacgtccgacagaacgaggggacgtaacggaggcaggttggagccgctgccgtcgccatgacccgcggtaaccagcgtgagctcgcccgccagaagaatatgaaaaagcagagcgactcggttaagggaaagcgccgagatgacgggctttctgctgccgcccgcaagcagagggactcggagatcatgcagcagaagcagaaaaaggcaaacgagaagaaggaggaacccaagtagctttgtggcttcgtgtccaaccctcttgcccttcgcctgtgtgcctggagccagtcccaccacgctcgcgtttcctcctgtagtgctcacaggtcccagcaccgatggcattccctttgccctgagtctgcagcgggtcccttttgtgcttccttcccctcaggtagcctctctccccctgggccactcccgggggtgagggggttaccccttcccagtgttttttattcctgtggggctcaccccaaagtattaaaagtagctttgtaattccaaaaaaaaaaaaaaaagggsggcccc

SEQ ID NO: 560 - DNA, 534 bp, Homo sapiens
  misc_feature (16): n equals a,t,g, or c
  misc_feature (17): n equals a,t,g, or c
gcgaccgccgcgccgnncacccatggacggcccggccatcatcacccaggtgaccaaccccaaggaggacgagggccggttgccgggcgcgggcgagaaagcctcccagtgcaacgtcagcttaaagaagcagaggagccgcagcatccttagctccttcttctgctgcttccgtgattacaatgtggaggcccctccacccagcagccccagtgtgcttccgccactggtggaggagaatggtgggcttcagaagccaccagctaagtaccttcttccagaggtgacggtgcttgactatggaaagaaatgtgtggtcattgatttagatgaaacattggtgcacagttcgtttaagcctattagtaatgctgattttattgttccggttgaaatcgatggaactatacatcaggtgtatgtgctgaagcggccacatgtggacgagttcctccagaggatggggcagcttttgaatgtgtgcwctttactgccgcwtggccaagtatgcagacctgtggctgacctcctaga

SEQ ID NO: 561 - DNA, 3043 bp, Homo sapiens
  misc_feature (3038): n equals a,t,g, or c
  misc_feature (3039): n equals a,t,g, or c
ctcaccatgtattcaggacagatccagattgggtagggctctgccaagagcctgtgggactggaagtcgggccctgggctgcccgatcgccagcccgaggacttaccatccacaatgcaccacggaagaggccgttctatgaaaaactgacacagactgtattcctgcattcaaatgtcagccgtttgtaaaatgctgtatcctaggaataagctgccctggtaaccagtctctagctagtgcctcttgccctctcctcacctccttttctctcagtgactctggaacctgaatgcagcttacaagacaagcctgacttttttctctgattaccttggcctcctcttggaaccagtgctgaaaggttttgaatcctttacccaacaatgcaaaaatagagccaatggttataacttggctagaaatatcaagagttgaatccatagtgtggggcccatgactctagctgggcaccttggacctccagctggccaatagaagagacaggagacaggaagccttcccattttttcaaagtctgtttaattgcctattacttctctcaaagagaacctgaagtcagaacacatgagcagggtgagaggtgaggcaaggttcatcctgaatgggagaggaagtcgaaccactgctgtgtgtcttgtcaggatgctcacttgttcctactgagatgctggatattgattttgtaacagcacctggtgtttcacggctgtccgagtgagctaacgtggcggtgtggctgcctggacctcctctttcaggttaacgctgacagaatggaggctcaggctgtctgcaagaaaacagttggtttggctgtgattttgacctcctcttccccactgccatcttctaagagactttgtagctgcctcctagaagcacattctgagcacatttgagacctctgtgttagaggggagactgcacaaactatcctcccccaggttgagacgtctgcagagtggcaagctgacttgtagaaatggggtgccatttatgctctacttagacaagggtaatcagaaatggaatcagtgcaggcaaaatttaggatttgccgcttccataaatcaaagcatgactaatagggggtctctgaaatgtaagggcacaaacttcacttagggcatcgcagatgtttgcagaatggttggcctaatgattatgctacagatgggttttaaatgacccgtctaggttactgcttccttgcaaaaaaagtcgaatcctgcattgaattgaatatgaatttctctaactctctccagaaaatggatggagataacttgtctttaaaactgtaggccagccttagccactgtggagcccttgcctccgagctctggcttcaaggggagctcttctccaggttcactaggtgaattgatttattattatcatattgataatgtgagattctttagccactttggggagcctgtctctccagaagcctttcttagtggtgcccacagttggagcccaggggccatgtttgcaaactgattcatgtgcatggctgacaggagtactggttcactaccaatgcctgagcttttctcttacatagaaaaactgtccrctctcagtaatcacaagcagcatccgttttgttttctcttcttgggagacatctgtcaaaccaggaatattcttgaaaagaacgtgagcaggaaaaactgctggtgatactttttttaagttttgtttttatcttgcctgttggcttcaatacatttgagaatacgctgaagagggaaaatttcagtgatggagattctagattaaatatcaggactgatttcctggtgggattatggtccagttttaccaaagaaccaattccttgaatgttggaatctaactttttatattgtcattattattgttgtttttaaacggttctttgtcttttctgttttatttttctcaagctgctttcaggagctagcagaaaataactcaaagttgaagactctggaagattttgctttaacctaactcgcattgatgtattaaatttataattttagcattcccaatagatcctatcattccttaaacataataccctttgtcttggagtagaatactaagttagagttagtggatttctagtttaggagaggagctcaaaactataatctttaacaaattgaaaaatgaaatagggtgttttccctttttgtgcacacctatattaccttaagaaatttccttccatagacagctgcctcaaagggaaatcctctttaaaccgtagttggcgcagaggtcagtcctagtcggagcttaggaggggcggagacgctcacatcgtctgacttgagtcgccactgattgtggcaacagctttgcctcatgagtcaaaaattggcaatttcttttgatttttagttgttgaatttgctgtttcaagcatttgtacatattagaagtctaaggagtagcaagtcagtgggaggactttttcacccctggcattagcagcttcgacctcattttccagatgcaccagctcctattaataagttagcaaggaaagtgtatgtcacgtgcaggaacagtgaggcagggacaggggttctgctccttctcacttcaccaccggcacacagcttgcccctgtctttgcccccaaaggtattttgtgtctagtgtcamattggagctattcttcactggtccttaaccttgggttttaaaaagaaggcttctctgtttgggtagcgtaagagctgagtatagtaagtcctcttccaaagagatggcaatatgctgggcatctactttaaaacaaagttgtctgatttttgcaagagaggttaggattttattgttcttatttccctttacagttctgcagttccatcacagtatttttttaaataactcaggtgtatgagaagaaattagaaaagaaaattaacttatgtggactgtaaatgttttatttgtaagattctataaataaagctatattctgtaaaaaaaaaaaaaaaaaaaaaaaaatnnctgc

SEQ ID NO: 562 - DNA, 1386 bp, Homo sapiens
  misc_feature (480): n equals a,t,g, or c
gcgtccgctccaacatcagaccctcgcctggctcccagctggtgctgaagctcgtcagttcaccatccgccctcggcttccgcggggcgctgggccgccagcctcggcaccgtcctttcctttctccctcgcgttaggcaggtgacagcagggacatgtctcgggagatgcaggatgtagacctcgctgaggtgaagcctttggtggagaaaggggagaccatcaccggcctcctgcaagagtttgatgtccaggagcaggacatcgagactttacatggctctgttcacgtcacgctgtgtgggactcccaagggaaaccggcctgtcatcctcacctaccatgacatcggcatgaaccacaaaacctgctacaaccccctcttcaactacgaggacatgcaggagatcacccagcactttgccgtctgccacgtggacgcccctggccagcaggacggcgcacytccttccccgcagntacatgtacccctccatggatcagctggctgaaatgcttcctggagtccttcaacagtttgggctgaaaagcattattggcatgggaacaggagcaggcgcctacatcctaactcgatttgctctaaacaaccctgagatggtggagggccttgtccttatcaacgtgaacccttgtgcggaaggctggatggactgggccgcctccaagatctcaggatggacccaagctctgccggacatggtggtgtcccacctttttgggaaggaagaaatgcagagtaacgtggaagtggtccacacctaccgccagcacattgtgaatgacatgaaccccggcaacctgcacctgttcatcaatgcctacaacagccggcgcgacctggagattgagcgaccaatgccgggaacccacacagtcaccctgcagtgccctgctctgttggtggttggggacagctcgcctgcagtggatgccgtggtggagtgcaactcaaaattggacccaacaaagaccactctcctcaagatggcggactgtggcggcctcccgcagatctcccagccggccaagctcgctgaggccttcaagtacttcgtgcagggcatgggatacatgcctcggctagcatgacccgcctgatgcggtcccgcacagcctctggttccagcgtcacttctctggatggcacccgcagccgctcccacaccagcgagggcacccgaagccgctcccacaccagcgagggcacccgcagccgctcgcacaccagcgagggggsccacctggamatcacccccmactcgggtgctgctgggaacagcgccgggcccaagtccatggaaggtctcctgctaggcggcctgcccagctgccgccccggactctgatctctgtagtggcccc

SEQ ID NO: 563 - DNA, 2638 bp, Homo sapiens
cccacgcgtccggaggtctacagtatttgtgttggcatagtttttgtaaaaaaaaagattaaaaaatatcaggatggtggaaaaactagatctgtgtatctctgttttggcatgcatttattcagtatcttctagcaatggtttttctctgttgatctaccgtagtatcctatttttaagtttattttatttttaaggagtattgtcatcacttttcaaggtgtcttgacttctacacaaagtatatatattcaggactttaaaaaatagcagtacacatttaacagtagcgaattacaccaaaatgatttactttgagatttgaataatttgcatagcagtaaaatgtgttttgtgtaacatacaaatagaaaaatgacccagtatcttaattgatacttactggagagtatcagaattacccagcagctcttacagaatgccataaattctttaagactaaatattgaaatcaattatttgaagtaatgttwctgatttactgttaaaagttgctgagctcagtttttggagatatcatttatgcctgcctgttcccttatgacagtgaggccttctttggctccacctagtatgataatcatgggttctgttttagttgatgagaagtggctcctatgaatgcctctgctcaatttctttttattttactttattttatttttaggggtctcgccaactcctgggctcaagtgattctcctgcttccacctccccacagtgctgggattacaggcatgagccaccacgcctggctctctgttcttttcagtgtctccgtgccatcagtcagcagtgcttacatgtttagcatattgtcatgcagtttctcttctgttcccacgagatatttttggrcaaaaaattgacaaaagtacatgtgtttttccccacctatcccttagaaaacctaatgtgtactgctatttttaaaaccaaaaagagacagcgtgacgatgcgtaaagcatttttcttagcctttcctttgtcttgatctgttaatgagaacaaaactgccagactcaaaatactctactattgtgctgaaagaaatacaatttagattgcacaaaatttgaaaatataactcagctgtcttttaaaagagttgtgttgttatctacaagactattagcagtcttttttcagagcaaattttaacagctagttgtgagtggtttaaaatatagaaaattattaaaatcttagtttgaggggttttatagtgggagaaaaaacaggaccaaagtttatgtgccttcttcagtagtcttaattgaccttttcttcctatttgagactaaagtagtatcagtattctggttttcaggaaatatgtactatatagttttaaaagaatgttgtcccaccaactattcatccaagcaaagaattgtaactataaataaagtctcagttacacttttgcctttatcacataatattcattgtagagcattgtgcaggtccaagaatagagctgctcaaaatctttgtggtagtttccttagtttttgtaacctgaggcatatgttccagagaacagggatatttgtctggtccagtgaccttggtgatcatagtcataattgaaagatgcctatggcatgcttaaatcagcattgtcaactgatttgttgttgtattattttcacttcttggatctatgtagtagttgtaataacaaatatttaaatagctatttttttgatgccattaaaaaaatcatactctggccttttttcccccttactgttgtttcccagatcttttaaaaattcatcccatatccagaaagtaccagttataaagattgctgaccaagcaaagttttgcatcaaagtgtcacctcattgctctgaccaaagactgactgttgtggttttaactcctctctgtaaagcattttgcattttccccaagctcctttctgaaagaagacccagtgcagagcggcctttactttcaatttctactgctgaatagactacttagagaaaatgtgagtttcagtgtgaacagaatggattaggatgacgagtttgatgggcattttcagtactgtatctaagaaaaaaaaaatagcacagctaggagcctctgacattgtctggtgttttacgtggtctgttcatcaaaattccccttttcagtttttaagaatgttcgtctaacagaagaaaatgctgtaaatatttgtaacaacattttttttaacaaggccaaaaaagaaaaaaaggtttttgggaacaaatgaacttataaagtggttttatataaaacatcaattgtcttgtatattttggataagcagcagtaccagctttcatttgtaacagtctgtggcattggraaaaaaggagtctgtgattgttgaagtgaattatgttataaatgcaaagagaagataaaatattaaaaaacatattttctaaatgcgtagtgcatggttaattcaagcttctgtacactacagtatattccattttcgttcagtttgtatatttgctgactattacttgatatctctaatctcttttcctaacaaatatagcattgtagcatgccttttaataaatgtcatgacatctgtactctcttaaaaaaaaaaaaaaa

SEQ ID NO: 564 - DNA, 691 bp, Homo sapiens
  misc_feature (569): n equals a,t,g, or c
  misc_feature (575): n equals a,t,g, or c
  misc_feature (581): n equals a,t,g, or c
  misc_feature (619): n equals a,t,g, or c
  misc_feature (650): n equals a,t,g, or c
  misc_feature (653): n equals a,t,g, or c
ggcagagcgcccgctccaggtcccgaggagcgcaggtgaggcggcaccccactcccggcggcccccgggcctccttccgcacgcaccccgagctgcctccgcacagttggaggagcgtaggagggacccccacccagggatgacactccaggaaggggactgcagaggaagccagactgtgtccctgacaatgggaacagccgacagtgatgagatggccccggaggccccacagcacacccacatcgatgtgcacatccaccaggagtytgccctggccaagctcctgctcacctgctgctctgcgctgcggccccgggccacccaggcmagggrcagcagccggctgctggwggcctcrtgggtgatgcagatcgtgctggggatcttgagtgcagtcctaggaggatttttctacatccgcgactacaccctcctcgtcacctcgggagctgcatctggacaggggctgtggctgtgctgctggagctgctgccttcatttaygagaaacggggtggtacatactgggccctgctgaggactctgctaacgctggcaagctttctncacagncatcgntggcctcaaactttgggaatgaagaattccgatatggnttactcttaattacaacaagtggctggccgnatnttcaggttcgagtggattggaacacttcaagcccccaa

SEQ ID NO: 565 - DNA, 1967 bp, Homo sapiens
gtagggatccattggagcattaaggagcacatatttttattaacttcttttgagctttcaatgttgatgtaatttttgttctctgtgtaatttaggtaaactgcagtgtttaacataataatgttttaaagacttagttgtcagtattaaataatcctggcattatagggaaaaaacctcctagaagttagattatttgctactgtgagaatattgtcaccactggaagttactttagttcatttaattttaattttatattttgtgaatattttaagaactgtagagctgctttcaatatctagaaatttttaattgagtgtaaacacacctaactttaagaaaaagaaccgcttgtatgattttcaaaagaacatttagaattctatagagtcaaaactatagcgtaatgctgtgtttattaagccagggattgtgggacttcccccaggcaactaaacctgcaggatgaaaatgctatattttctttcatgcactgtcgatattactcagatttggggaaatgacatttttatactaaaacaaacaccaaaatattttagaataaattcttagaaagttttgagaggaatttttagagaggacatttcctccttcctgatttggatattccctcaaatccctcctcttactccatgctgaaggagaagtactctcagatgcattatgttaatggagagaaaaagcacagtattgtagagacaccaatattagctaatgtattttggagtgttttccattttacagtttatattccagcactcaaaactcagggtcaagttttaacaaaagaggtatgtagtcacagtaaatactaagatggcatttctatctcagagggccaaagtgaatcacaccagtttctgaaggtcctaaaaatagctcagatgtcctaatgaacatgcacctacatttaataggagtacaataaaactgttgtcagcttttgttttacagagaacgctagatattaagaattttgaaatggatcatttctacttgctgtgcattttaaccaataatctgatgaatatagaaaaaaatgatccaaaatatggatatgattggatgtatgtaacacatacatggagtatggaggaaattttctgaaaaatacatttagattagtttagtttgaaggagaggtgggctgatggctgagttgtatgttactaacttggccctgactggttgtgcaaccattgcttcatttctttgcaaaatgtagttaagatatactttattctaatgaaggccttttaaatttgtccactgcattcttggtatttcactacttcaagtcagtcagaacttcgtagaccgacctgaagtttctttttgaatacttgtttctttagcactttgaagatagaaaaaccactttttaagtactaagtcatcatttgccttgaaagtttcctctgcattgggtttgaagtagtttagttatgtctttttctctgtatgtaagtagtataatttgttactttcaaatacccgtactttgaatgtaggtttttttgttgttgttatctataaaaattgagggaaatggttatgcaaaaaaatattttgctttggaccatatttcttaagcataaaaaaaatgctcagttttgcttgcattccttgagaatgtatttatctgaagatcaaaacaaacaatccagatgtataagtactaggcagaagccaattttaaaatttccttgaataatccatgaaaggaataattcaaatacagataaacagagttggcagtatattatagtgataattttgtattttcacaaaaaaaaagttaaactcttcttttctttttattataatgaccagcttttggtatttcattgttaccaagttctatttttagaataaaattgttctccttctaaaaaaaaaaaaaaaaaaaaaaaaaaaaaaaaaaaaaaaaaaaggggggggag

SEQ ID NO: 566 - DNA, 1334 bp, Homo sapiens
  misc_feature (1253): n equals a,t,g, or c
  misc_feature (1307): n equals a,t,g, or c
  misc_feature (1309): n equals a,t,g, or c
  misc_feature (1312): n equals a,t,g, or c
gaattcggcacgagggagcctcctggggtgtccacgtgagcgcgcgtgagtccgcccccccagtcacgtgaccgctgactcggggcgttctccactatcgcttacctacctccctctgcaggaacccggcgatatggctgccgctgtgccccgcgccgcatttctctccccgctgcttccccttctcctgggcttcctgctcctctccgctccgcatggcggcagcggcctgcacaccaagggcgcccttcccctggatacggtcactttctacaaggtcattcccaaaagcaagttcgtcttggtgaagttcgacacccagtacccctacggtgagaagcaggatgagttcaagcgtcttgctgaaaactcggcttccagcgatgatctcttggtggcagaggtggggatctcagattatggtgacaagctgaacatggagctgagtgagaaatacaagctggacaaagagagctacccagtcttctacctcttccgggatggggactttgagaacccagtcccatacactggggcagttaaggttggagccatccagcgctggctgaaggggcaaggggtctacctaggtatgcctggttgcctgcctgtatacgacgccctggccggggagttcatcagggcctctggtgtggaggcccgccaggccctcttgaagcaggggcaagataacctctcaagtgtgaaggagactcagaagaagtgggccgagcaatacctgaagatcatggggaagatcttagaccaaggggaggacttcccagcatcagagatgacacggatcgccaggctgattgagaagaacaagatgagtgacgggaagaaggaggagctccagaagagcttaaacatcctgactgccttccagaagaagggggccgagaaagaggagctgtaaaaaggctgtctgtgattttccagggtttggtgggggtagggaggggagagttaacctgctggctgtgagtcccttgtggaatataagggggtagtgggaaaagtggtactaacccacgattctgagccctgagtatgcctggacattgatgctaacatgaccatgcttgggatgtctctagctggtctggggatagctggagcacttactcaggtggctggtgaaatgacacctcagaaggaatgagtgctatagagaggagagaggagtgtactgcccaggtctttgacagatgtaattctcattcaattaaagtttcagtgttttggttaantaaaaaaaaaaaaaaaaaaaaaaaaaaaaaaaaaaaaaaaaaaagggcggccgntntanaggatccctcgaggggcccaag

SEQ ID NO: 567 - DNA, 1610 bp, Homo sapiens
gccggccagtgcgggaaccgtttccgaaggaccaccgggaacagacggatcggcagggcgrggcggaacggcgtttgcaatggctgctactgtgaacttggaacttgatcccatttttttgaaagcactaggtttcttgcattcaaagagtaaagattctgctgaaaagctaaaagcactgcttgatgaatctttggctcggggcattgattccagttaccgtccatctcaaaaggatgtggagccacccaaaatttcaagcacaaaaaacatttccattaagcaagagcccaaaatatcatccagtcttccttctggtaataataatggcaaggtcctcacaactgaaaaggtaaagaaggaagctgaaaagagacctgctgataaaatgaaatcagacatcactgaaggagttgatattccaaagaaacctagattggagaaaccagaaacacagtcatctcccattactgtccaaagtagcaaggatttacctatggctgacctttccagttttgaggagaccagtgctgatgattttgccatggagatgggattggcctgcgttgtttgtaggcaaatgatggtggcatctggcaatcaattagtagaatgtcaggagtgccataatctctaccaccgagattgtcataaaccccaggtgacagacaaggaagcgaatgaccctcgcctggtgtggtattgtgcccgatgtaccagacaaatgaaaagaatggctcaaaaaactcagaaaccaccgcagaaaccagcccctgcagttgtttctgtaactccagctgtcaaagatccattggttaagaaaccagaaactaaactgaaacaagagacaacttttctagcgtttaagagaacagaagtcaagacatccacagttatttcaggaaattcttctagtgccagcgtttcctcgtcagtaactagtggcttaactggatgggcagcttttgcagccaaaacttcctctgctggtccttcaacagcaaaattgagttcaacaacacaaaacaatactgggaaacctgctacttcgtcagctaaccagaaacctgtgggtttgactggtctggcaacatcatccaaaggtggaataggttccaaaataggttccaataacagcactacgcccactgtacctttaaaaccacctccacctctaaccttgggtaaaactggccttagtcgctcagttagttgtgacaatgtcagcaaagtaggtcttcctagtccaagtagtttagttccaggaagcagcagccaactaagtgggaatggaaatagtggaacatcaggacctagtggaagtactaccagcaaaactacttcagaatccagcagctctccctcagcatcccttaaaggcccaacttcacaagaatcacagctcaatgctatgaagcgattacagatggtcaagaagaaagctgcccaaaagaaactcaagaagtaatgtggccaagtaggtttttgtatcatattagcctaaagatgaaaggcttattattatgatataatctgtaatacactgtaatttaataaaagtcttcataatcaaaaaaaaaaaaaaaaaaaagaaaaaaaaaaaaaaaaaa

SEQ ID NO: 568 - DNA, 1412 bp, Homo sapiens
  misc_feature (1018): n equals a,t,g, or c
  misc_feature (1037): n equals a,t,g, or c
aattcggcacgagagaaaacattgcaaaagctaaacgactaaaaaaggattgaaggactgaacaggctttgcaaccagaggaaaatcatttggaaaattacacagctttggaagaatccactaaagtttcttctttggatttcttgacagtatgatttagtaaatgaaatttgaccaaatggaagaatcatgttagttctgacctcaatactatagtaacttttaggcgtgggtgtagaagtttataggtttctattgacagttattgtaaattagcatttactgtggtacaaattctttataactgacttagtcatttgccgcttagcagtttatatactgaaatgaaaacatcttgtggggaaaagtgactttagattatgaactcaattcaaatgaactctatttaaaatggggtcctattttggacaaaggaaattaagaatgtaaaagtcagaacagtcttgaggtaaaaagtgtgctttggcttaaaagggatacagtatattaattacatcttttattattattgtttatttcttagaatcatttctggctttctcaaaacaaaataatattaatgagtacttctatttgctgcatttttcttattacagcctttgagacagctggtaattataagtcattttccattttttaaaacataattttataaagaattctcttatctcgactatgtagaataccacctactggacagaacaatttttgtactcacaaacactgccattttcttagagatggcttgagaggagtaacactatggtttaaagcttgcagtaaaaatgccaaacactgtagtaccttggaacccagtttattcttgtgctaagcagaactgtaaaatagttaaaatgtcttatcaagtaattcgccgattacaaagacaccatttgttttttatttcattctttgktttaactcatgtggtagtgatatttaatactttctgatcaaacaggttcaaagtaaaacgttaaatttcacatttcttttnaaagaactcttaaagtgtnacagttacgccatacttcataagtggtaaagaaaggtataaaatttggaaacattttgttgggcatagtagtgattgggtgaaaaggataaattatatcaaaatgagaatgtgctgtaattggaagtagggagctaaaggatgtttctttcagtttagtagaactggaacgttttactattaaacatggcttttataaatgcatggtccaataattttattcactgttagtatttaattcactgtcagcttattaatgttttctgtacccattaatgaattttaaattacaaaaaattgtctagcagctacagtttaaaaatgaaactagacattaaaataaatttgataattttttataaaaaaaaaaaaaaag

SEQ ID NO: 569 - DNA, 1125 bp, Homo sapiens
gacaacgggggcgaagcgcaggcgcaaggagcaagcgcagattgtgggcggctgtgtcagctgacccaaggggccttcgaggtgccttaggccgcttgccttgctctcagaatcgctgccgccatggctagtcagtctcaggggattcagcagctgctgcaggccgagaagcgggcagccgagaaggtgtccgaggcccgcaaaagaaagaaccggaggctgaagcaggccaaagaagaagctcaggctgaaattgaacagtaccgcctgcagagggagaaagaattcaaggccaaggaagctgcggcattgggatcccgtggcagttgcagcactgaagtggagaaggagacccaggagaagatgaccatcctccagacatacttccggcagaacagggatgaagtcttggacaacctcttggcttttgtctgtgacattcggccagaaatccatgaaaactaccgcataaatggatagaagagagaagcacctgtgctgtggagtggcattttagatgccctcacgaatatgaagcttagcacagctctagttacattcttatgatatggcattaaattatttccatatattatataataggtccttccactttttggagagtagcaaatctagcttttttgtacagacttagaaattatctaaagatttcatctttttacctcatatttcttaggaatttaatggttatatgttgtctttttttcctatgtcttttggctcaagcaacatgtatatcagtgttgactttttctttcttagatctagtttaaaaaaaaaaaaaaccacataacaattctttgaagaaaggaagggattaaataatttttttccctaacactttcttgaaggtcaggggctttatctatgaaaaagtagtaaatagttctttgtaacctgtgtgaagcagcagccagccttaaagtagtccattcttgctaatggttagaacagtgaatactagtggaattgtttgggctgcttttagtttctcttaatcaaaattactagatgatagaattcaagaacttgttacatgtattacttggtgtatcgataatcatttaaaagtaaagactctgtcatgcatttttccccaaaaaa

SEQ ID NO: 570 - DNA, 1916 bp, Homo sapiens
  misc_feature (1899): n equals a,t,g, or c
ggggagggtcagttggaggcaggcgctcgctgaggcaaaaggaggcgctcggcccgcggcctgacagggacttagcccgcagagatcgaccccgcgcgcgtgaccccacacccacccactcatccatctatccactccctgcgccgcctcctcccaccctgagcagagccgccgaggatgataaacacccaggacagtagtattttgcctttgagtaactgtccccagctccagtgctgcaggcacattgttccagggcctctgtggtgctcctgatgcccctcacccactgtcgaagatccccggtgggcgagggggcggcagggatccttctctctcagctctaatatataaggacgagaagctcactgtgacccaggacctccctgtgaatgatggaaaacctcacatcgtccacttccagtatgaggtcaccgaggtgaaggtctcttcttgggatgcagtcctgtccagccagagcctgtttgtagaaatcccagatggattattagctgatgggagcaaagaaggattgttagcactgctagagtttgctgaagagaagatgaaagtgaactatgtcttcatctgcttcaggaagggccgagaagacagagctccactcctgaagaccttcagcttcttgggctttgagattgtacgtccaggccatccctgtgtcccctctcggccagatgtgatgttcatggtttatcccctggaccagaacttgtccgatgaggactaatagtcatagaggatgctttacccaagagccacagtgggggaagaggggaagttaggcagccctgggacagacgagagggctcctcgctgtctagggaaggacactgaggggctcagggtgagggttgcctattgtgttctcggagttgactcgttgaaattgttttccataaagaacagtataaacatattattcacatgtaatcaccaatagtaaatgaagatgtttatgaactggcattagaagctttctaaactgcgctgtgtgatgtgttctatctagcctaggggaggacattgcctagagggggagggactgtctgggttcaggggcatggcctggagggctggtgggcagcactgtcaggctcaggtttccctgctgttggctttctgttttggttattaagacttgtgtattttctttctttgcttcctgtcaccccaggggctcctgagtataggcttttcagtccctgggcagtgtccttgagttgttttttgacactcttacctgggcttctctgtgtgcatttgcgtctggcctggagtaagcaggtccgacccctccttctttacagcttagtgttattctggcatttggttaagctggcttaatctgtttaatgttatcagtacattttaaataggggcattgaaatttactcccaccaccagggcttttttgggggatgcctgggcctttaaaacactagccaaactctaattaattctcaaatcactgccaggagttcttgctcctggctgcaggcccaggccccaaggtctccttcttggggtcacaaacagcagtaaggaagaggaatatatagcaactcagggcctgggaattgtggggcaatccgttcttagggactggatacttctggctggctgagtatagtactagctgcctccccaccaggttccgagtagtgtctgagactctgctctgcagggcctagggtagcgctgggagtgtagaagtggcctgcccttaactgttttcactaaacagctttttctaaggggagagcaagggggagagatctagattgggtgagggggacggggatgtcagggaggcaagtgtgttgtgttactgtgtcaataaactgatttaaagttraaaaaaaaaaaaaaaaaaactcngrgggggcgctatagtg

SEQ ID NO: 571 - DNA, 1253 bp, Homo sapiens
  misc_feature (1205): n equals a,t,g, or c
  misc_feature (1207): n equals a,t,g, or c
  misc_feature (1212): n equals a,t,g, or c
cgcgtccgcccacgcgtccgcccacgcgtccgcccacgcgtccgctcaggaggcgggaggaggacccggaatgaagacgaaggcgctcaccattaaatcgtacggctcgcactgccccctgcccgcagtccagcgtcttcaaccgtttctgcggcagctctggaggccgcggctttggctcagggaaagccatgctcccaggactccttccttgcagccttaaatcggtctgtacggaaaattccgcgccttagaaacccacgcttgggtgtaaccttattattgttcttcctgacctacttcctgtttatcacttccgggttcatcattttggcatttcggtgatcgggttggaactattgaagcccgctttcaggttcttttccccattttccctttgaaaggaagacttctggcttctcctaaatctccgttctctgggtaaggggagtccaagcctctgtcatgaggaacggaaatgcgagggcctcgggtgttactctaaaatccgccctcagcttgcacgccggaagctgcgattcctgcagcggaagaggcgtgatctggccttcgactcgctatgtccactaacaatatgtcggacccacggaggccgaacaaagtgctgaggtacaagcccccgccgagcgaatgtaacccggccttggacgacccgacgccggactacatgaacctgctgggcatgatcttcagcatgtgcggcctcatgcttaagctgaagtggtgtgcttgggtcgctgtctactgctccttcatcagctttgccaactctcggagctcggaggacacgaagcaaatgatgagtagcttcatgctgtccatctctgccgtggtgatgtcctatctgcagaatcctcagcccatgacgcccccatggtgataccagcctagaagggtcacattttggaccctgtctatccactaggcctgggctttggctgctaaacctgctgccttcagctgccatcctggacttccctgaatgaggccgtctcggtgcccccagctggatagagggaacctggccctttcctagggaacaccctaggcttacccctcctgcctcccttcccctgcctgctgctgggggagatgctgtccatgtttctaggggtattcatttgctttctcgttgaaacctgttgttaataaagtttttcactctgaaaaaaaaaaaaaaaaanrnaaaanctygrgggggggcccggaacccaattcsccggatagtgagt

SEQ ID NO: 572 - DNA, 2013 bp, Homo sapiens
cctgggagcacctctttgcttttcacaccaaaccaaaactgscgaragccctcctagccaccagtgatccccaagcatccagtacagaaccaggcatcgagctagctccctgcacggccgcaccctcccagagaactccttgaggagaacaagtgcccttggggacagccggcakgcgcccctgtacgtctgctcatgcaccaggcagcacagccgcagttcctcagttgttgttttgacatatttcagtttccacctcaygtttttagagcagaaccacactgtctccctggaggggctcgagggcatgaccggggactgaccattctgtgaaagkagcagaatgtgaggagcacgcgtgagcttatgtaccgtgaagatgatcagaggatatcttattttaagagtaaaaacccacataattttatttctgcttgatagtcatggtagtctgtcatacccacctctgggactctgcgtggctgtttggctgtcacttgtagcaataacgacattagttctagtcagtgctgttttacatttttcttttgatgggtttagtcttgccctggagtgccgatgatgattctccctccagagccacgcttgggaacatgaagcaagtctggcgtgtgggctgcgtgccggccttagtgggacccgtggggttggagcatgcctttaggggcagtgtctgggccgaagcacgtcccaccacacagtgccagagccagagaaggggccccaccaccaaggccaagcttgaccaggtcagcattgccatggcccagtgtgccccgtggcctctgaagatccctctgtgcagggtctgcagggatctggattgcaagggcccaagtctgcaggtctggaagcatcttcctataagagcactttcgccttctgggtcaggactccaaggtgcagcgggcttcacagccctacaattgggttctcagctaagccccagagttctggtagaaccatcccggggcgggtggagggtgggatttaagggagacgggaacacatggggcaggtcctggaacttggtggcctgaggactgaggccattgccctggtggaaaggcctggcctggttcctgtggcttgggacctgaataggcaggtgctgctggctccgtagaaacccttttcccatcttttgctctttgccaaacctaccttgctttgggagctgcctgcaccaccccagagaaggccccaccttcttcatccctcagacccgaggaggcctcccagtaaggagtttcccaagaggggactcacaggaaacaagtcttagtgcttgggagggaggccccgctgcgtgctcagactcacagccaacctggaaggtagacgagatagcgccacccacgcccctccacaccccagactccgagtaaagcgggcggtagggccggagtcacctcccctatggcagtggccgccgctgtactccatcctcccgtcaggaagatcagctgtaaataaacgctgggctccccagagcacctgtccgcccactgcccttgctgttctgggatcttcgctgcagttcacgggaaacaagcctgagtccgctcgcacccgcggctgctctcccggctcggcccggccgcctctgtctccggccaccgggtggcgctgccgagccagagccgccgcgtcccggcgctttccaggagccccaggcccggaggagcgaagcccgcagagcaaaggtggaaacacgtgcctacgctgtaaagaaatcctgttccagagcatacctgttgtacaaacagacactgttcctaacgagaggagtgacgtattttcatcaccgtttttaatttgttttcttacgggtttacgattttgaatttttcttatttggttgaaagaattttgattctatcagcctgagtgagttcagcctgtaaaaaggatgttaagctgtgggtaaaatatgcaaacgaaaagaaatatattgtacaaattctatataataagaaaaaaaaaaaaaaa

SEQ ID NO: 573 - DNA, 669 bp, Homo sapiens
  misc_feature (445): n equals a,t,g, or c
  misc_feature (631): n equals a,t,g, or c
  misc_feature (638): n equals a,t,g, or c
cgtttgcccggcgctgccgcgtctctctcggctcccgcttcctttgaccgcctccccccccggcccggcggcgcccgcctcctccacggccactccgcctcttccctcccttcgtcccttcttcctctcccttttttccttcttccttcccctcctcgccgccaccgcccaggaccgccggccgggggacgagctcggagcagcagccagagtttattaaccacttaacctctcagaactgaacaaagacaacattgttcctggaacgccctctttttaaaaaagaaagcataacccctactgtagaactaaatgcactgtgcatgaaacttggaaaaaaaccaatgtataagcctgttgacccttactctcggatgcaktcmacctataactacaacatgagaggaggtgcttatcccccgaggtacttttacccatttccagntccacctttactttatcaagtggaactttctgtgggaggacagcaatttaatggcaaaggaaagacaagacaggctgcgaaacacgatgctgctgccaaagcggttgaggatcctgcagaatgagcccctggcagaagagggctgaggtgaaaggaagagaatccgaagaagaaaactcaataaanctgaaanaaagcaaggggttgagatgccttaaacggga

SEQ ID NO: 574 - DNA, 2432 bp, Homo sapiens
  misc_feature (7): n equals a,t,g, or c
  misc_feature (2326): n equals a,t,g, or c
  misc_feature (2367): n equals a,t,g, or c
acacagnagaaacacagcattccaggctggccccacctctatattgataagtagccaatgggagcgggtagccctgatccctggccaatggaaactraggtaggcgggtcatcgcgctggggtctgtagtctgagcgctacccggttgctgctgcccaaggaccgcggagtcggacgcaggcagaccatgtggaccctggtgagctgggtggccttaacagcagggctggtggctggaacgcggtgcccagatggtcagttctgccctgtggcctgctgcctggaccccggaggagccagctacagctgctgccgtccccttctggacaaatggcccacaacactgagcaggcatctgggtggcccctgccaggttgatgcccactgctctgccggccactcctgcatctttaccgtctcagggacttccagttgctgccccttcccagaggccgtggcatgcggggatggccatcactgctgcccacggggcttccactgcagtgcagacgggcgatcctgcttccaaagatcaggtaacaactccgtgggtgccatccagtgccctgatagtcagttcgaatgcccggacttctccacgtgctgtgttatggtcgatggctcctgggggtgctgccccatgccccaggcttcctgctgtgaagacagggtgcactgctgtccgcacggtgccttctgcgacctggttcacacccgctgcatcacacccacgggcacccaccccctggcaaagaagctccctgcccagaggactaacagggcagtggccttgtccagctcggtcatgtgtccggacgcacggtcccggtgccctgatggttctacctgctgtgagctgcccagtgggaagtatggctgctgcccaatgcccaacgccacctgctgctccgatcacctgcactgctgcccccaagacactgtgtgtgacctgatccagagtaagtgcctctccaaggagaacgctaccacggacctcctcactaagctgcctgcgcacacagtgggggatgtgaaatgtgacatggaggtgagctgcccagatggctatacctgctgccgtctacagtcgggggcctggggctgctgcccttttacccaggctgtgtgctgtgaggaccacatacactgctgtcccgcggggtttacgtgtgacacgcagaagggtacctgtgaacaggggccccaccaggtgccctggatggagaaggccccagctcacctcagcctgccagacccacaagccttgaagagagatgtcccctgtgataatgtcagcagctgtccctcctccgatacctgctgccaactcacgtctggggagtggggctgctgtccaatcccagaggctgtctgctgctcggaccaccagcactgctgcccccagggctacacgtgtgtagctgaggggcagtgtcagcgaggaagcgagatcgtggctggactggagaagatgcctgcccgccgggcttccttatcccaccccagagacatcggctgtgaccagcacaccagctgcccggtggggcagacctgctgcccgagcctgggtgggagctgggcctgctgccagttgccccatgctgtgtgctgcgaggatcgccagcactgctgcccggctggctacacctgcaacgtgaaggctcgatcctgcgagaaggaagtggtctctgcccagcctgccaccttcctggcccgtagccctcacgtgggtgtgaaggacgtggagtgtggggaaggacacttctgccatgataaccagacctgctgccgagacaaccgacagggctgggcctgctgtccctaccgccagggcgtctgttgtgctgatcggcgccactgctgtcctgctggcttccgctgcgcagccaggggtaccaagtgtttgcgcagggaggccccgcgctgggacgcccctttgagggacccagccttgagacagctgctgtgagggacagtactgaagactctgcagccctcgggaccccactcggagggtgccctctgctcaggcctccctagcacctccccctaaccaaattctccctggaccccattctgagctccccatcaccatgggaggtggggcctcaatctaaggccttccctgtcagaagggggttgtggcaaaagccacattacaagctgccatcccctccccgtttcagtggaccctgtggccaggtgcttttccctatccacaggggtgtttgtgtgtgtgcgcgtgtgcgtttcaataaagtttgtacactttcaaaaaaaaaaaaaaaaaaaagggsggccgctctaaaagatccaaggggccaancttacccttgcatgccaactctaactctctcccaataattnattcttatataactaaggcactggccgtcttttaaaacttctgaatggaaattgctacttgggat

SEQ ID NO: 575 - DNA, 1372 bp, Homo sapiens
  misc_feature (71): n equals a,t,g, or c
  misc_feature (1335): n equals a,t,g, or c
  misc_feature (1338): n equals a,t,g, or c
  misc_feature (1370): n equals a,t,g, or c
tccgcccacgcgtccgagcggatcgcgkgctcgggctgcggggctccggctgcgggcgctgggccgcgagngcggagcttgggagcggacccaggccgtgccgcgcggcgccatgaagggcaaggaggagaaggagggcggcgcacggctgggcgctggcggcggaagcccgagaagagcccgagcgcgcaggagctcaaggagcagggcaatcgtctgttcgtgggccgaaagtacccggaggcggcggcctgctacggccgcgcgatcacccggaacccgctggtggccgtgtattacaccaaccgggccttgtgctacctgaagatgcagcagcacgagcaggccctggccgactgccggcgcgccctggagctggacgggcagtctgtgaaggcgcacttcttcctggggcagtgccagctggagatggagagctatgatgaggccatcgccaatctgcagcgagcttacagcctggccaaggagcagcggctgaacttcggggacgacatccccagcgctcttcgaatcgcgaagaagaagcgctggaacagcattgaggagcggcgcatccaccaggagagcgagctgcactcctacctctccaggctcattgccgcggagcgtgagagggagctggaagagtgccagcgaaaccacgagggtgatgaggacgacagccacgtccgggcccagcaggcctgcattgaggccaagcacgacaagtacatggcggacatggacgagcttttttctcaggtggatgagaagaggaagaagcgagacatccccgactacctgtgtggcaagatcagctttgagctgatgcgggagccgtgcatcacgcccagtggcatcacctacgaccgcaaggacatcgaggagcacctgcagcgtgtgggtcattttgaccccgtgacccggagccccctgacccaggaacagctcatccccaacttggctatgaaggaggttattgacgcattcatctctgagaatggctgggtggaggactactgaggttccctgccctacctggcgtcctggtccaggggagccctgggcagaagcccccggcccctatacatagtttatgttcctggccaccccgaccgcttcccccaagttctgctgttggactctggactgtttcccctctcagcatcgcttttgctgggccgtgatcgtccccctttgtgggctggaaaagcaggtgagggtgggctgggctgaggccattgccgccactatctgtgtaataaaatccgtgagcacgaaaaaaaaaaaaaaaaaaaaaaaaaaaaaaaaaaaaaaaaattggggggggccccntanccaattggccctaaagggggggtttaaaaaanaa

SEQ ID NO: 576 - DNA, 2020 bp, Homo sapiens
gctccccgcgkcckcttcgcttttgtggcggcgcccgcgctcgcaggccactctctgctgtcgcccgtcccgcgcgctcctccgacccgctccgctccgctccgctcggccccgcgccgcccgtcaacatgatccgctgcggcctggcctgcgagcgctgccgctggatcctgcccctgctcctactcagcgccatcgccttcgacatcatcgcgctggccggccgcggctggttgcagtctagcgaccacggccagacgtcctcgctgtggtggaaatgctcccaagagggcggcggcagcgggtcctacgaggagggctgtcagagcctcatggagtacgcgtggggtagagcagcggctgccatgctcttctgtggcttcatcatcctggtgatctgtttcatcctctccttcttcgccctctgtggaccccagatgcttgtcttcctgagagtgattggaggtctccttgccttggctgctgtgttccagatcatctccctggtaatttaccccgtgaagtacacccagaccttcacccttcatgccaaccgtgctgtcacttacatctataactgggcctacggctttgggtgggcagccacgattatcctgatyggctgtgccttcttcttctgctgcctccccaactacgaagatgaccttctgggcaatgccaagcccaggtacttctacacatctgcctaacttgggaatgaatgtgggagaaaatcgctgctgctgagatggactccagaagaagaaactgtttctccaggcgactttgaacccattttttggcagtgttcatattattaaactagtcaaaaatgctaaaataatttgggagaaaatattttttaagtagtgttatagtttcatgtttatcttttattatgttttgtgaagttgtgtcttttcactaattacctatactatgccaatatttccttatatctatccataacatttatactacatttgtaagagaatatgcacgtgaaacttaacactttataaggtaaaaatgaggtttccaagatttaataatctgatcaagttcttgttatttccaaatagaatggactcggtctgttaagggctaaggagaagaggaagataaggttaaaagttgttaatgaccaaacattctaaaagaaatgcaaaaaaaaagtttattttcaagccttcgaactatttaaggaaagcaaaatcatttcctaaatgcatatcatttgtgagaatttctcattaatatcctgaatcattcatttcagctaaggcttcatgttgactcgatatgtcatctaggaaagtactatttcatggtccaaacctgttgccatagttggtaaggctttcctttaagtgtgaaatatttagatgaaattttctcttttaaagttctttatagggttagggtgtgggaaaatgctatattaataaatctgtagtgttttgtgtttatatgttcagaaccagagtagactggattgaaagatggactgggtctaatttatcatgactgatagatctggttaagttgtgtagtaaagcattaggagggtcattcttgtcacaaaagtgccactaaaacagcctcaggagaataaatgacttgcttttctaaatctcaggtttatctgggctctatcatatagacaggcttctgatagtttgcaactgtaagcagaaacctacatatagttaaaatcctggtctttcttggtaaacagattttaaatgtctgatataaaacatgccacaggagaattcggggatttgagtttctctgaatagcatatatatgatgcatcggataggtcattatgattttttaccatttcgacttacataatgaaaaccaattcattttaaatatcagattattattttgtaagttgtggaaaaagctaattgtagttttcattatgaagttttcccaataaaccaggtattctaaaaaaaaaaaaaaaaaaaaactcgaggggggcccggtacccawtcgccgtatatga

SEQ ID NO: 577 - DNA, 3161 bp, Homo sapiens
ctcatttactgtaatatttatgatacagtgaatatgaaaatgcactggtcagaaggcactctcaaagagccgcactgctcctgacatcgtccttagcaatgaaatcacaaagacagccaaagcagtcctgcttcttggaaatcagaagctgcctttatcacatataaagccaaacagggcataaccatgtcacgtgagcatgtcatcaggcttctgaggacttgttctttataaaaaaagaccttcacaaaatatcttggcttagagatagcagtctttattaacaaaggccacctaggctgacacctgcagataatcatctccttttctttgtctatgttgtacattttcatgatataacttttaactatgtctagagaaggcaggctctgcaagagaggtgccctttcaacccgctcagtgccctggacaggagatgctgtgttaaactgttaatggatatctatatgagaagctcatttttgtatgctatccctgcagtttttttttttctaacaggcccatgtttgagaataaacaagtctgtgatgtcagagacaaaggtgtattcttcagtctgcaggtgtgtggcacctcccttctcccctgcagccccccacatccagagccgttcctgagagtgacatcatgcatcaagaaaacataaccttggtcctcaggtgaacccttggaacattctgtgaccgcctgatgtccattctgagccaccttggcacacatgcttacaggcagcactgctaagggttcaggtgccccatggctgacagcccgagttgcttctgtggaccatcatgccgctcggcacgtcctgagacagaagttgctgcaggaaggagcttctggagaggtcctgtggcatgtgtgggggtgtgtgtgtgtatgtttccttcttgaacagacattccaactttagatgtgtttatagaactgacctttttactaacaaaatacaatgatatatgttggaaactacttaatatgcttttcctgcacaccttagcaataactgtaggggtctctgctagagttgtttgtatgtacagcaattttgaacaaattgttttaaatgtaatataagagaattagtttaaggaagtaaagagaatcatttgcttgtgttacattttcagtgaggattcagtttaagagtcattcttaggacttccatttcctaatatttattcatgggtaatgaagaaatggtttgcattttgtggccagtcctaatttattttccagctgagccctaacttccggctcccacctacctccacggacttcctaacagagacttatgaataccaggatgtgtttttgttaagtcaggttcaattcgttgcccctgtcagttttatagagtgtgagggtcactccattaaagatctctcctgggtggatcctacttggatgttcaggtgattttgaaaactgctaacatttttaaaaggctagaacatcctttgacttcttgaaaatctgcatgtctggcttgggttttattaccacatgcctgagttcttcaagaatggaaggctcaagtattctcatcttccatttgccaaacttccttcctgatttgagtcacgtgttccacttggaaagaaagggaacagagagcctcctccatggacagtgtatgaatttcattgggaatcttgctctctcccgcctctatgcctttctctctttttaaccttactttacataatattatagatgggccaagaaaagaaaagatgacataacattttgatgaatttcacctattccattcttcacgtttcagaattggtcgactttgttagaagataattgaagtagccttgggtcaaaagcaaccttttcaattgtgatcatacctaaaacatataaaaaccctgccgtagattaaaagcaattataaaatcataaaattgaatgtttgcagaatcctggagcagtagatttctttgtctttggcctgcggactagaaagagggcagcagtagtatgctggagcttccctgggataccagccacatggtttcttttcattagatctgatttttgtttcccactgtagatctgattttgtagttgaaaacatttcaccaccatcaaacactatttctgaatattgtgcctttttatacctagcctagatgaaaaccgatgccattcttattcagaaaatccccccatcctacatgactgttatctagacataaagcaaagtgcatttaattcaaaatttggttcacaatataagtattttgtaaaagccagctgaaccagcattttatcaggtggaaatctctgcaagccaaattgctgatactccttcatgcagatcaacttggtgtcccagtcagaatagaacagcataattacctggagttagggggagtatttctgcactattacttgtcagggagagaagaaacttagaattgtccctcaaaggagtgtcaagaagtatgaataaatgtcctttcaccagctcacaggccagaaatggaggacccaagtcaactaggtgaaactactagcagacccagctttcccataataacctaatctgcaaattgttctattaaagtctcattgttttcaggatgcaatgaaagtggatttcaaaaggctttggaaaaataagtggaacatgactgatcttgaaaaaaaaagcaaaagcttaaatatttgatacaagtttacttagctacaacatactttacattgttgcctttagttatctcacaggcactgacattttatatttagaaaatacttttaatctttctaatctttttttgtaaatattagtgtccattctgtatgactcgctaacctactttgcaaggctttgggcaacattttagctcattaacttcaagatgatgtgtcatctgtataggtcaaagaatgggacttctgaactgaggaatttgctgttgacagccaaagtatagtgtacaagattgatgtaacttgatatgtatttttgttgaagttttttgtaaaaaaaaattatttacaatgttatttgaatgatttttttaaatgctgtgaatctatatttgttgttttrtatattaaaattcatttgccaaaaaaaaaaaaaaaaaaaaaaaaaaaaaaaaaaaactcgagactagttctct

SEQ ID NO: 578 - DNA, 2046 bp, Homo sapiens
gtcatgcagtgcgccggagaactgtgctctttgaggccgacgctaggggcccggaagggaaactgcgaggcgaaggtgaccggggaccgagcatttcagatctgctcggtagacctggtgcaccaccaccatgttggctgcaaggctggtgtgtctccggacactaccttctagggttttccacccagctttcaccaaggcctcccctgttgtgaagaattccatcacgaagaatcaatggctgttaacacctagcagggaatatgccaccaaaacaagaattgggatccggcgtgggagaactggccaagaactcaaagaggcagcattggaaccatcgatggaaaaaatatttaaaattgatcagatgggaagatggtttgttgctggaggggctgctgttggtcttggagcattgtgctactatggcttgggactgtctaatgagattggagctattgaaaaggctgtaatttggcctcagtatgtcaaggatagaattcattccacctatatgtacttagcagggagtattggtttaacagctttgtctgccatagcaatcagcagaacgcctgttctcatgaacttcatgatgagaggctcttgggtgacaattggtgtgacctttgcagccatggttggagctggaatgctggtacgatcaataccatatgaccagagcccaggcccaaagcatcttgcttggttgctacattctggtgtgatgggtgcagtggtggctcctctgacaatattagggggtcctcttctcatcagagctgcatggtacacagctggcattgtgggaggcctctccactgtggccatgtgtgcgcccagtgaaaagtttctgaacatgggtgcacccctgggagtgggcctgggtctcgtctttgtgtcctcattgggatctatgtttcttccacctaccaccgtggctggtgccactctttactcagtggcaatgtacggtggattagttcttttcagcatgttccttctgtatgatacccagaaagtaatcaagcgtgcagaagtatcaccaatgtatggagttcaaaaatatgatcccattaactcgatgctgagtatctacatggatacattaaatatatttatgcgagttgcaactatgctggcaactggaggcaacagaaagaaatgaagtgactcagcttctggcttctctgctacatcaaatatcttgtttaatggggcagatatgcattaaatagtttgtacaagcagctttcgttgaagtttagaagataagaaacatgtcatcatatttaaatgttccggtaatgtgatgcctcaggtctgcctttttttctggagaataaatgcagtaatcctctcccaaataagcacacacattttcaattctcatgtttgagtgattttaaaatgttttggtgaatgtgaaaactaaagtttgtgtcatgagaatgtaagtcttttttctactttaaaatttagtaggttcactgagtaactaaaatttagcaaacctgtgtttgcatatttttttggagtgcagaatattgtaattaatgtcataagtgatttggagctttggtaaagggaccagagagaaggagtcacctgcagtcttttgtttttttaaatacttagaacttagcacttgtgttattgattagtgaggagccagtaagaaacatctgggtatttggaaacaagtggtcattgttacattcatctgctgaacttaacaaaactgttcatcctgaaacaggcacaggtgatgcattctcctgctgttgcttctcagtgctctctttccaatatagatgtggtcatgtttgacttgtacagaatgttaatcatacagagaatccttgatggaattatatatgtgtgttttacttttgaatgttacaaaaggaaataactttaaaactattctcaagagaaaatattcaaagcatgaaatatgttgctttttccagaatacaaacagtatactcatgagcaaaaaaaaaaaaagggcggccgctctagaggatccctcgaggggcccaa

SEQ ID NO: 579 - DNA, 302 bp, Homo sapiens
  misc_feature (8): n equals a,t,g, or c
  misc_feature (226): n equals a,t,g, or c
  misc_feature (241): n equals a,t,g, or c
ctgcgggnaactgctgatggctcagggactgtcagcctctgctctggaaggcctgaagacggaagaagggagtgtcagaggcgccctgccagctgtgtcatctcccccagctccagtttcaccctcatcacccaccacacataatggggagctggagccgtcattctcccccttgctaggagaagggaagacgcccgagacgctgcttccccagaagtgctggggncagggaggcccaggnagatgagagagaaggtccgagtaggtggatagaagacaaggggggagaccgagccggagtg

SEQ ID NO: 580 - DNA, 3067 bp, Homo sapiens
  misc_feature (626): n equals a,t,g, or c
  misc_feature (1808): n equals a,t,g, or c
  misc_feature (2945): n equals a,t,g, or c
gcgcctgcaggtcgacactagtggatccaaagaattcggcacaggagcggcgcgcgctcggacctctcccgccctgctcgttcgctctccagcttgggatggccggctacctgcgggtcgtgcgctcgctctgcagagcctcaggctcgcggccggcctgggcgccggcggccctgacagcccccacctcgcaagagcagccgcggcgccactatgccgacaaaaggatcaaggtggcgaagcccgtggtggagatggatggtgatgagatgacccgtattatctggcagttcatcaaggagaagctcatcctgccccacgtggacatccagctaaagtattttgacctcgggctcccaaaccgtgaccagactgatgaccaggtcaccattgactctgcactggccacccagaagtacagtgtggctgtcaagtgtgccaccatcacccctgatgaggcccgtgtggaagagttcaagctgaagaagatgtggaaaagtcccaatggaactatccggaacatcctgggggggactgtcttccgggagcccatcatctgcaaaaacatcccacgcctagtccctggctggaccaagcccatcaccattggcaggcacgcccatggngaccagtacaaggccacagactttgtggcagaccgggccggcactttcaaaatggtcttcaccccaaaagatggcagtggtgtcaaggagtgggaagtgtacaacttccccgcaggcggcgtgggcatgggcatgtacaacaccgacgagtccatctcaggttttgcgcacagctgcttccagtatgccatccagaagaaatggccgctgtacatgagcaccaagaacaccatactgaaagcctacgatgggcgtttcaaggacatcttccaggagatctttgacaagcactataagaccgacttcgacaagaataagatctggtatgagcaccggctcattgatgacatggtggctcaggtcctcaagtcttcgggtggctttgtgtgggcctgcaagaactatgacggagatgtgcagtcagacatcctggcccagggctttggctcccttggcctgatgacgtccgtcctggtctgccctgatgggaagacgattgaggctgaggccgctcatgggaccgtcacccgccactatcgggagcaccagaagggccggcccaccagcaccaaccccatcgccagcatctttgcctggacacgtggcctggagcaccgggggaagctggatgggaaccaagacctcatcaggtttgcccagatgctggagaaggtgtgcgtggagacggtggagagtggagccatgaccaaggacctggcgggctgcattcacggcctcagcaatgtgaagctgaacgagcacttcctgaacaccacggacttcctcgacaccatcaagagcaacctggacagagccctgggcaggcagtagggggaggcgccacccatggctgcagtggaggggccagggctgagccggcgggtcctcctgagcgcggcaragggtgagcctcacarcccccagcaccgggagtcttggccagggatggggagcggggaggctmcarctccgctccaaccccctgaggaggtcactccccatccagccacccctgcccgccggcctccgagtccccgaaggtcccaccatccccgcaggaactccctggatggagggggccgatcccggggagcgggttctgcacagcctgaaccccagcacttccagcccaaaaagcacaactcttatccccagccaccccaaccctacccagcccagcgncccccagggcccgctaccccccatacactactcccccacgaatgagacggcagcgttctgcccctgacctcaaggagagtggggcagctgtgtgagtcccacatcctgggcagagggcctggtggggcccyttgctaggagaagggaagacgcccgagacgctgcttccccagaagtgctggggcagggaggcccaggagatgagagagaaggtccgagtaggtgatagaagacaagggggagaccgagccggagytgaggaaaggaagagggcacggakttgccaggagcaaaccaaagtgaagagagagataggaagctgcctcggggccaccccttgcaaagggggtgtgtcccacaaacgctgctatgggtggggtggggggctggggtgctgcgtagccagtgtttgactttcttttcaagtgggggaaagtgggagaggactgagagtgaggcaagttctccccagcccctgtccgtctgtctgtctgtctgtggtggtttctgtttcttgggaggcatggtaggatcataagtcattcccctccccttccaggcctcctgctatatttgggggacctgactggtttggctggagtcccatgaggatgtgggccctttaataaaggatagcaaacagggagcttgtggcctgtttgttttgggttttcatggaggtgtaggttatataaggcaatggcacaggtcttaagcatacttatcagtgaagtattgtatgtgtgctctgtgcaggcaccacccagatctggatataagaatgtttccatcttgtcttcctgaacttcaccctcctgtctcttccttcagggtgcgcasccgatcttttccccgctttttttttttttgggagacagggtcttgctttgttgcccaggctggaggtacagtcttggctcactgcagcctccgcctcctgagtagctgggattacaggcatgtgccaccacgcccggctcattactgttttttttgtagtgacgaggtttcaccatgttggccaggctggtctcgaactcctgatgacctcaagtgatccgcccaccttggcctcccaaagtggtgggattacaggtgtgagccaccgcgcccggcctcccctgctttcatgtttgnttacccagtgtctcagtctgtgccagcagcamcactgtctgtwatggacaaagcacagaagcggggatgcraggggaagtagagggaccgccagcctgtcaaggcttaactggctgttgctg

SEQ ID NO: 581 - DNA, 1574 bp, Homo sapiens
  misc_feature (457): n equals a,t,g, or c
gtacggattcccgggtcgacccacgcgtccggcggcggcgacggcgacatggagagcggggcctacggcgcggccaaggcgggcggctccttcgacctgcggcgcttcctgacgcagccgcaggtggtggcgcgcgccgtgtgcttggtcttcgccttgatcgtgttctcctgcatctatggtgagggctacagcaatgcccacgagtctaagcagatgtactgcgtgttcaaccgcaacgaggatgcctgccgctatggcagtgccatcggggtgctggccttcctggcctcggccttcttcttggtggtcgacgcgtatttcccccagatcagcaacgccactgaccgcaagtacctggtcattggtgacctgctcttctcagctctctggaccttcctgtggtttgttggtttctgcttcctcaccaaccagtgggcagtcaccaacccgaagnacgtgctggtgggggccgactctgtgagggcagccatcaccttcagcttcttttccatcttctcctggggtgtgctggcctccctggcctaccagcgctacaaggctggcgtggacgacttcatccagaattacgttgaccccactccggaccccaacactgcctacgcctcctacccaggtgcatctgtggacaactaccaacagccacccttcacccagaacgcggagaccaccgagggctaccagccgccccctgtgtactgagcggcggttagcgtgggaagggggacagagagggccctcccctctgccctggactttcccatgagcctcctggaactgccagcccctctctttcacctgttccatcctgtgcagctgacacacagctaaggagcctcatagcctggcgggggctggcagagccacaccccaagtgcctgtgcccagagggcttcagtcagcygctcactcctccagggcacttttaggaaagggtttttagctagtgtttttcctcgcttttaatgacctcagccccgcctgcagtggctagaagccagcaggtgcccatgtgctactgacaagtgcctcagcttccccccggcccgggtcaggccgtgggagccgctattatctgcgttctctgccaaagactcgtgggggccatcacacctgccctgtgcagcggagccggaccaggctcttgtgtcctcactcaggtttgcttcccctgtgcccactgctgtatgatctgggggccaccaccctgtgccggtggcctctgggctgcctcccgtggtgtgagggcggggctggtgctcatggcacttcctccttgctcccacccctggcagcagggaagggctttgcctgacaacacccagctttatgtaaatattctgcagttgttacttaggaagcctggggagggcaggggtgccccatggctcccagactctgtctgtgccgagtgtattataaaatcgtgggggagatgcccggcctgggatgctgtttggagacggaataaatgttttctcattcaaaaaaaaaaaaaaaaaaaaaaaaaaaaaaaaaaaaaaaaaaaaaaaaaaaaaaaaaaaagggcggcc

SEQ ID NO: 582 - DNA, 960 bp, Homo sapiens
  misc_feature (924): n equals a,t,g, or c
  misc_feature (937): n equals a,t,g, or c
  misc_feature (939): n equals a,t,g, or c
agagtcaggaggcagagctctgggaatctcaccatggcctggacccctctcctgctccccctcctcactttctgcacagtctctgaggcctcctatgagytgacacagccaccctcggtgtcagtgtccccaggacaaacggccmggatcacctgctctggagatgcmttgccaamaaaatatrcttattggtaccagcagaagtcaggccaggcccctgtgytggtcatctatgaggacaccagacgaccctccgcgatccctgagagattctctgcctccagctcagggacaatggccaccttgactatcagtggggcccaggtggaggatgaagcggactactactgctactcaacagacagcagttcttattacagggtgttcggcggagggaccaagctgaccgtcctaggtcagcccaaggctgccccctcggtcactctgttcccrccctcctctgaggagcttcaagccaacaaggccacactggtgtgtctcataagtgacttctacccgggagccgtgacagtggcctggaaggcagatagcagccccgtcaaggcgggagtggagaccaccacaccctccaaacaaagcaacaacaagtacgcggccagcagctacctgagcctgacgcctgagcagtggaagtcccacaraagctacagctgccaggtcacgcatgaagggagcaccgtggagaagacagtggcccctacagaatgttcataggttctcaaccctcaccccccaccacgggagactagagctgcaggatcccaggggaggggtctctcctcccaccccaaggcatcaagcccttctccctgcactcaataaaccctcaataaatattctcattgtcaatcagaaaaaaaaaaaaaaaaaaaaaaggggggggcccggtaccmattggccttnggkgggtggtttnanwttaatggcckggtttaaaag

SEQ ID NO: 583 - DNA, 541 bp, Homo sapiens
cgccggccgcgcccacgtgaycggtccgggtgcaaacacgcgggtcagctgatccggcccaactgcggcgtcatcccggctataagcgcacggcctcggcgaccctctccgacccggccgccgccgccatgcagccctccagccttctgccgctcgccctctgcctgctggctgcacccgcctccgcgctcgtcaggatcccgctgcacaagttcacgtccatccgccggaccatgtcggaggttgggggctctgtggaggacctgattgccaaaggccccgtctcaaagtactcccaggcggtgccagccgtgaccgaggggcccattcccgaggtgctcaagaactacatggacgcccagtamtacggggagattggcatcgggacgcccccccagtgcttcacagtcgtcttcgacacgggctyctycaacctgtgggtcccctccatccactgcaaactgctggacatcgcttgctggatycaccacaagtamaacagcgacaagtccagcaactacgtgaagaatggtaactcgtt

SEQ ID NO: 584 - DNA, 2968 bp, Homo sapiens
  misc_feature (454): n equals a,t,g, or c
  misc_feature (1437): n equals a,t,g, or c
  misc_feature (2961): n equals a,t,g, or c
  misc_feature (2964): n equals a,t,g, or c
aattcggcacgagatcctctggctgctctgctcccaccgcccggcccccggcaggccccccacccacaatgcacacaactggaggctcggccaggcgcccgccarctggtacaatgacacctaccccctgtctcccccacaaaggacaccggctgggattcggtatcgaatcgcagttatcgcagacctggacacagagtcaagggcccaagaggaaaacacctggttcagttacctgaaaaagggctacctgaccctgtcagacagtggggacaaggtggccgtggaatgggacaaagaccatggggtcctggagtcccacctggcggagaaggggagaggcatggagctatccgacctgattgttttcaatgggaaactctactccgtggatgaccggacgggggtcgtctaccagatcgaaggcagcaaagccgtgccctgggtgattctntccgacggcgacggcaccgtggagaaaggcttcaaggccgaatggctggcagtgaaggacgagcgtctgtacgtgggcggcctgggcaaggagtggacgaccactacgggtgatgtggtgaacgagaacccggagtgggtgaaggtggtgggctacaagggcagcgtggaccacgagaactgggtgtccaactacaacgccctgcgggctgctgccggcatccagccgccaggctacctcatccatgagtctgcctgctggagtgacacgctgcagcgctggttcttcctgccgcgccgcgccagccaggagcgctacagcgagaaggacgacgagcgcaagggcgccaacctgctgctgagcgcctcccctgacttcggcgacatcgctgtgagccacgtcggggcggtggtccccactcacggcttctcgtccttcaagttcatccccaacaccgacgaccagatcattgtggccctcaaatccgaggaggacagcggcagagtcgcctcctacatcatggccttcacgctggacgggcgcttcctgttgccggagaccaagatcggaagcgtgaaatacgaaggcatcgagttcatttaactcaaaacggaaacactgagcaaggccatcaggactcagcttttataaaaacaagaggagtgcacttttgttttgttttgttctttttggaactgtgcctgggttggaggtctggacagggagcccagtcccgggccccatagtggtgcgggcactggacccccgggccccacggaggccgcggtctgaactgctttccatgctgccatctggtggtgatttcggtcacttcaggcattgactcaaggcctgcctaactggctgggtcgtttcttccatccgacctcgtttcttttctttcctatgttcttttgttcagtgaatatccctagagctcctaccatatgtcaggccctatgcctcaccctgagaacgcagtnagcatgaggtggacctgtttgctgggaaccccaggtcacccccttttcttcctactctgtgcctggagcatcatgtccacccctgcagatccttggaaaagaaaatgtttatgttgcagggtattgcatggtcacgagtgagggcaggcccctggggacacatctgcccacagctgcacaggccagggcgcaggcacatctgttggttctcaggcctcagataaaaccatctccgcatcatatggccagtgaccgctttctcccttcaagaaaattctgtggctgtgcagtactttgaagttttaattattaacctgctttaattaaagcagtttcctttcttataaagtggaatcaccaaatcttatcacacagagcacagtcctgtagttacccagcccgctccagcagtgcgggagattgtaaggaagcggtggcggctggtgaagcaagtctcacatgtcggcgttcttggccaatggatacaaagataaagaaaatgttgcctttttctaggaactgtcagaaatcctcatgcctttcaagacttctgtgaatgacttgaattttttattccctgcctagggtctgtgaacgaggcctgtctcttccctggggtttctttccatggcctttatttctcctcttccagtgggagttttgcaggctcttctctgtggaaacttcacgagcgttggctgggcctcggcttcgctggagtgtactccagggtgaaggcagagtgggatttgagacccaggttaggcacgacccaggctgagaagggacgtttccatcattcacagtgccctccccacagcactacctcaccccgacccccaccctcactcctaccccaccccgcgatcgtcaggggtgccacggtgggccggagggtgccggctctggctgtccctgtgccggtccctcacaaacctctccccctttgaaactcaagcacagctgcgaggagggcagcgaggagggacccctctctcatggttgtctctttcccccgctatgtcataggtagtggaggaagcgaaggaagtgaacgctgaatgtgacgcatttctgaagagctcagctgtcaccgggcatagcctggaagccccaagtctgttctgactttgcctggctgtctccttgacccgcctcctagatcattgtccttgatgtccaggctgggtcatttaaaatagagatgcaatcaggaaggttgggggacttgggactgtggctgaattgagaccttgctgatgtattcatgtcagcacctgagtcacagcccaggtgcccggaagcagcctcttcgcataggcagtgatttgcgattactttaaagctcaccttttttcttcccctctctgttcgctgctgtcagcataatgattgtgttccttccctatgggatccatctgttttgtaaacaataaagcgtctgagggagtgtaaaaaaaaaaaaaaaaaaaaaaaaaaaaaaaaaaaaaaaaaaaaaaaaaaaaaaacaaaaaaaaaaaaaanagnagag

SEQ ID NO: 585 - DNA, 2608 bp, Homo sapiens
  misc_feature (84): n equals a,t,g, or c
ggcgcgggctaggaaaggagttggttcgcgcaggtgcggcgcctgggtccccatggcgctgtggcgcggctccgcgtacgcggncttcctggcgctggccgtgggctgcgtcttcctgctggagccagagctgccaggctcggcgctgcgctctctctggagctcgctgtgtctggggcccgcgcctgcgcccccgggacccgtctcccccgagggccggttggcggcagctgggacgcgcttatcgtgcggccagtccggcgctggcgccgcgtggcagtgggagtcaatgcatgtgttgatgtggtgctctcaggggtgaagctcttgcaggcacttggccttagtcctgggaatgggaaagatcacagcattctgcattcaaggaatgatctggaagaagccttcattcacttcatggggaagggagcagctgctgagcgcttcttcagtgataaggaaacttttcacgacattgcccaggttgcgtcagagttcccaggagcccagcactatgtaggaggaaatgcagctttaattggacagaaatttgcagccaactcagatttaaaggttcttctttgcggtccagttggtccaaagctacatgagcttcttgatgacaatgtctttgttccaccagagtcattgcaggaagtggatgagttccacctcattttagagtatcaagcaggggaggagtggggccagttaaaagctccccatgccaaccgattcatcttctctcacgacctctccaacggggccatgaatatgctggaggtgtttgtgtctagcctggaggagtttcagccagacctggtggtcctctctggattgcacatgatggagggacaaagcaaggagctccagaggaagagactcttggaggttgtaacctccatttctgacatccccactggtattccagttcacctagagctggccagtatgactaacagggagctcatgagcagcattgtccatcagcaggtctttcccgcggtgacttcccttgggctgaatgaacaggagctgttatttctcacccagtcagcctctggacctcactcttctctctcttcctggaacggtgttcctgatgtgggcatggtcagtgacatcctcttctggatcttgaaagaacatgggaggagtaaaagcagagcctcggatctcaccaggatccatttccacacgctggtctaccacatcctggcaactgtggatggacactgggccaaccagctggcagccgtggctgcaggagctcgtgtggctgggacacaggcctgcgccacagaaaccatagacaccagccgagtgtctctgagggcaccccaagagttcatgacttcccattcggaggcaggctccaggattgtattaaacccaaacaagccagtagtagaatggcacagagagggaatatccttccacttcacaccagtattggtgtgtaaagaccccattcgaactgtaggccttggagatgccatttcagccgaaggactcttctattcggaagtacaccctcactattaggaagattcttaggggtaatttttctgaggaaggagaactagccaacttaagaattacaggaagaaagtggtttggaagacagccaaagaaataaaagcagattaaaytgtatcaggtacattccagcctgttggcaactccataaaaacatttcagattttaatccgaatttagctaatgagactggatttttgttttttatgttgtgtgtcacagagctaaaaactcagttcccaaatccccagtttatgcagcgccatcaggtattttaagctaaacttcttcacccctgagagcatgtcagctggagaaaagcagttcttccttgcccacttgagaagtgcacgcccactcacccaacatcctggtctctaggaaagcctcatgtgaggttcctctttctttcagctcagtgcccatgggcaaggatcatgatttccattccgtgttacaatgacaatatttaatgagcataaccttctcagtctcctgctctcaaatttaggacagagccgctaaggacaaaacaatccctcccgtgctttatgatggcagcaggggctggggagcctctgagggactctttcattctgcagttgtctggaagcctgggtggcgtcatgagctgaaggatcatgctttcctgtcctggctccataggttataggctggctggtgaaaggttcacgtggcccaggctgaacttcattgcctagctttggatgtgctttctgccataaagactgatttttgttcgttctgagccttcaaggaatttgttttttacaactggaatatgctcctgtgtgtgttaacagatcatggatgttttatgttttcactgatcatttaaagagtttgacctcagagctccaggatcatcagtaaatttgtcatgttatatatttatttttttataaatcaagacttctgtgtgctcttaaatatattaaaaacaatttacatttcaggaattctgtctgtaattgatttttgtctccatcaccactctggaaccagataagataaaaatcattctgatcttcaaaaaaaaaaaaaaaaa

SEQ ID NO: 586 - DNA, 1893 bp, Homo sapiens
  misc_feature (1184): n equals a,t,g, or c
  misc_feature (1865): n equals a,t,g, or c
  misc_feature (1883): n equals a,t,g, or c
  misc_feature (1887): n equals a,t,g, or c
  misc_feature (1893): n equals a,t,g, or c
cccacgcgtccgcggacgcgtgggcgcgcgggagctgggaggctgcgagatccctaccgcagtagccgcctctgccgccgcggagcttcccgaacctcttcagccgcccggagccgctcccggagcccggccgtagaggctgcaatcgcagccgggagcccgcagcccgcgccccgagcccgccgccgcccttcgagggcgccccaggccgcgccatggtgaaggtgacgttcaactccgctctggcccagaaggaggccaagaaggacgagcccaagagcggcgaggaggcgctcatcatcccccccgacgccgtcgcggtggactgcaaggacccagatgatgtggtaccagttggccaaagaagagcctggtgttggtgcatgtgctttggactagcatttatgcttgcaggtgttattctaggaggagcatacttgtacaaatattttgcacttcaaccagatgacgtgtactactgtggaataaagtacatcaaagatgatgtcatcttaaatgagccctctgcagatgccccagctgctctctaccagacaattgaagaaaatattaaaatctttgaagaagaagaagttgaatttatcagtgtgcctgtcccagagtttgcagatagtgatcctgccaacattgttcatgactttaacaagaaacttacagcctatttagatcttaacctggataagtgctatgtgatccctctgaacacttccattgttatgccacccagaaacctactggagttacttattaacatcaaggctggaacctatttgcctcagtcctatctgattcatgagcacatggttattactgatcgcattgaaaacattgatcacctgggtttctttatttatcgactgtgtcatgacaaggaaacttacaaactgcaacgcagagaaactattaaaggtattcagaaacgtgaagccagcaattgtttcgcaattcggcattttgaaaacaaatttgccgtggaaactttaatttgttcttgaacagtcaagaaaaacattattgaggaaaattaatatcacagcataaccccaccctttacattttgtgcagtgattattttttaaagtcttctttcatgtaagtagcaaacagggctttactatcttttcatctcattaattcaattaaaaccattaccttaaaatttnaaaaaaaaaaaaaaaaaggcccgccgcgctcgcctctccgccccgcgtccagctcgcccagctcgcccagcgtccgccgcgcctcggccaaggcttcaacggaccacaccaaaatgccatctcaaatggaacacgccatggaaaccatgatgtttacatttcacaaattcgctggggataaaggctacttaacaaaggaggacctgagagtactcatggaaaaggagttccctggatttttggaaaatcaaaaagaccctctggctgtggacaaaataatgaaggacctggaccagtgtagagatggcaaagtgggcttccagagcttcttttccctaattgcgggcctcaccattgcatgcaatgactattttgtagtacacatgaagcagaagggaaagaagtaggcagaaatgagcagttcgctcctccctgataagagttgtcccaaagggtcgcttaaggaatctgccccacagcttcccccatagaaggatttcatgagcagatcaggacacttagcaaatgtaaaaataaaatctaactctcatttgacaagcagagaaagaaaagttaaataccagataagcttttgatttttgtattgtttgcatccccttgccctcaataaataaagttcttttttagttccaaaaaaaaaaaaagggcggccgtttaarngatccaasttacgtaccntgcntgcgan

SEQ ID NO: 587 - DNA, 2463 bp, Homo sapiens
  misc_feature (2413): n equals a,t,g, or c
ttggactcttgggcacaggatttgcatcaggattgtgacatactagagtcgacttcaatgttcctatgaagaacaaccagataacaaacaaccagaggattaaggctgctgtcccaagcatcaaattctgcttggacaatggagccaagtcggtagtccttatgagccacctaggccggcctgatggtgtgcccatgcctgacaagtactccttagagccagttgctgtagaactcaaatctctgctgggcaaggatgttctgttcttgaaggactgtgtaggcccagaagtggagaaagcctgtgccaacccagctgctgggtctgtcatcctgctggagaacctccgctttcatgtggaggaagaagggaagggaaaagatgcttctgggaacaaggttaaagccgagccagccaaaatagaagctttccgagcttcactttccaagctaggggatgtctatgtcaatgatgcttttggcactgctcacagagcccacagctccatggtaggagtcaatctgccacagaaggctggtgggtttttgatgaagaaggagctgaactactttgcaaaggccttggagagcccagagcgacccttcctggccatcctgggcggagctaaagttgcagacaagatccagctcatcaataatatgctggacaaagtcaatgagatgattattggtggtggaatggcttttaccttccttaaggtgctcaacaacatggagattggcacttctctgtttgatgaagagggagccaagattgtcaaagacctaatgtccaaagctgagaagaatggtgtgaagattaccttgcctgttgactttgtcactgctgacaagtttgatgagaatgccaagactggccaagccactgtggcttctggcatacctgctggctggatgggcttggactgtggtcctgaaagcagcaagaagtatgctgaggctgtcactcgggctaagcagattgtgtggaatggtcctgtgggggtatttgaatgggaagcttttgcccggggaaccaaagctctcatggatgaggtggtgaaagccacttctaggggctgcatcaccatcataggtggtggagacactgccacttgctgtgccaaatggaacacggaggataaagtcagccatgtgagcactgggggtggtgccagtttggagctcctggaaggtaaagtccttcctggggtggatgctctcagcaatatttagtactttcctgccttttagttcctgtgcacagcccctaagtcaacttagcattttctgcatctccacttggcattagctaaaaccttccatgtcaagattcagctagtggccaagagatgcagtgccaggaacccttaaacagttgcacagcatctcagctcatcttcactgcaccctggatttgcatacattcttcaagatcccatttgaattttttagtgactaaaccattgtgcattctagagtgcatatatttatattttgcctgttaaaaagaaagtgagcagtgttagcttagttctcttttgatgtaggttattatgattagctttgtcactgtttcactactcagcatggaaacaagatgaaattccatttgtaggtagtgagacaaaattgatgatccattaagtaaacaataaaagtgtccattgaaaccgtgatttttttttttttcctgtcatactttgttaggaagggtgagaatagaatcttgaggaacggatcagatgtctatattgctgaatgcaagaagtggggcagcagcagtggagagatgggacaattagataaatgtccattctttatcaagggcctactttatggcagacattgtgctagtgcttttattctaacttttatttttatcagttacacatgatcataatttaaaaagtcaaggcttataacaaaaaagccccagcccattcctcccattcaagattcccactccccagaggtgaccactttcaactcttgagtttttcaggtatatacctccatgtttctaagtaatatgcttatattgttcacttcttttttttttattttttaaagaaatctatttcataccatggaggaaggctctgttccacatatatttccacttcttcattctctcggtatagttttgtcacaattatagattagatcaaaagtctacataactaatacagctgagctatgtagtatgctatgattaaatttacttatgtaacttttattgtctttggcattaacagtgtttcaaaaaattttctgtgtatacccatcagtgattcattcccaaatcttctagaagcataagtgtctcaatatattaaaacatattgaataatccttgttagagttatccctgcaggagtccttagtgctcctttatccaatttgtacttgangccctctaggcagggtgtacagctagctgttgctctggtatttcctataa

SEQ ID NO: 588 - DNA, 1945 bp, Homo sapiens
  misc_feature (1240): n equals a,t,g, or c
  misc_feature (1939): n equals a,t,g, or c
  misc_feature (1945): n equals a,t,g, or c
acaggatctaccccctctgcagcccttcaagaagaggtatgattgctaccacttttccccacaaagtgacgaaaggaaacagcgacggaagcgcaaccgaaccctggaattggtgtctcgactggtccattcccggcccacccccattaaccggctcgagccactcccaggacgaagtcaaggcctcggaaggcgactacaactcccagcaggtcgagcagctccgcccgcgctgattctccattggccttccgggggtggggattagatgggaggtggccgtggggctgcggccgggatttgtcccctcttcggcttccgtagaggaagtggcgcggaccttcatttggggtttcggttcccccccttccccttccccggggtctgggggtgacattgcaccgcgcccctcgtggggtcgcgttgccaccccacgcggactccccagctggcgcgcccctcccatttgcctgtcctggtcaggcccccaccccccttcccacctgaccagccatgggggctgcggtgtttttcggctgcactttcgtcgcgttcggcccggccttcgcgcttttcttgatcactgtggctggggacccgcttcgcgttatcatcctggtcgcaggggcatttttctggctggtctccctgctcctggcctctgtggtctggttcatcttggtccatgtgaccgaccggtcagatgcccggctccagtacggcctcctgatttttggtgctgctgtctctgtccttctacaggaggtgttccgctttgcctactacaagctgcttaagaaggcagatgaggggttagcatcgctgagtgaggacggaagatcacccatctccatccgccagatggcctatgtttctggtctctccttcggtatcatcagtggtgtcttctctgttatcaatattttggctgatgcacttgggccaggtgtggttgggatccatggagactcaccctattacttcctgacttcagcctttctgacagcagccattatcctgctccataccttttggggagttgtgttctttgatgcctgtgagaggagacggtactgggctttgggcctggtggttgggagtcacctactgacatcgggactgacattcctgaacccctggtatgaggccagcctgctgcccatctatgcagtcactgtttccatggggctctgggccttcatcacagctggagggtccctccgaagtattcagcgcagcntcttgtgtaaggactgactacctggactgatcgcctgacagatcccacctgcctgtccactgcccatgactgagcccagccccagcccgggtccattgcccacattctctgtctccttctcgtcggtctaccccactacctccagggttttgctttgtccttttgtgaccgttagtctctaagctttaccaggagcagcctgggttcagccagtcagtgactggtgggtttgaatctgcacttatccccaccacctggggacccccttgttgtgtccaggactccccctgtgtcagtgctctgctctcaccctgcccaagactcacctcccttcccctctgcaggccgacggcaggaggacagtcgggtgatggtgtattctgccctgcgcatcccacccgaggactgagggaacctaggggggacccctgggcctggggtgccctcctgatgtcctcgccctgtatttctccatctccagttctggacagtgcaggttgccaagaaaagggacctagtttagccattgccctggagatgaaattaatggaggctcaaggatagatgagctctgagtttctcagtactccctcaagactggacatcttggtctttttctyaggcctgagggggaaccatttttggtgtgataaataccctaaatgsctttttttcttttttgaggtggggggaagggangaaggn

SEQ ID NO: 589 - DNA, 816 bp, Homo sapiens
tcgacccacgcgtccggtcatggcgccccgaagcctcctcctgctgctctcaggggccctggccctgaccgatacttgggcgggctcccactccttgaggtatttcagcaccgctgtgtcgcggcccggccgcggggagccccgctacatcgccgtggagtacgtagacgacacgcaattcctgcggttcgacagcgacgccgcgattccgaggatggagccgcgggagccgtgggtggagcaagaggggccgcagtattgggagtggaccacagggtacgccaaggccaacgcacagactgaccgagtggccctgaggaacctgctccgccgctacaaccagagcgaggctgggtctcacaccctccagggaatgaatggctgcgacatggggcccgacggacgcctcctccgcgggtatcaccagcacgcgtacgacggcaaggattacatctccctgaacgaggacctgcgctcctggaccgcggcggacaccgtggctcagatcacccagcgcttctatgaggcagaggaatatgcagaggagttcaggacctacctggagggcgagtgcctggagttgctccgcagatacttggagaatgggaaggagacgctacagcgcgcagatcctccaaaggcacacgttgcccaccaccccatctctgaccatgaggccaccctgaggtgctgggccctgggcttctaccctgcggagatcacgctgacctggcagcgggatggggaggaacagacccaggacacagagcttgtggagaccaggcctgcaggggatggaaccttcagaagtgggct

SEQ ID NO: 590 - DNA, 2307 bp, Homo sapiens
gcccacgcgtccggcgcccccgagcagcgcccgcgccctccgcgccttctccgccgggacctcgagcgaaagacgcccgcccgccgcccagccctcgcctccctgcccaccgggcacaccgcgccgccaccccgaccccgctgcgcacggcctgtccgctgcacaccagcttgttggcgtcttcgtcgccgcgctcgccccgggctactcctgcgcgccacaatgagctcccgcatcgccagggcgctcgccttagtcgtcacccttctccacttgaccaggctggcgctctccacctgccccgctgcctgccactgccccctggaggcgcccaagtgcgcgccgggagtcgggctggtccgggacggctgcggctgctgtaaggtctgcgccaagcagctcaacgaggactgcagcaaaacgcagccctgcgaccacaccaaggggctggaatgcaacttcggcgccagctccaccgctctgaaggggatctgcagagctcagtcagagggcagaccctgtgaatataactccagaatctaccaaaacggggaaagtttccagcccaactgtaaacatcagtgcacatgtattgatggcgccgtgggctgcattcctctgtgtccccaagaactatctctccccaacttgggctgtcccaaccctcggctggtcaaagttaccgggcagtgctgcgaggagtgggtctgtgacgaggatagtatcaaggaccccatggaggaccaggacggcctccttggcaaggagctgggattcgatgcctccgaggtggagttgacgagaaacaatgaattgattgcagttggaaaaggcagctcactgaagcggctccctgtttttggaatggagcctcgcatcctatacaaccctttacaaggccagaaatgtattgttcaaacaacttcatggtcccagtgctcaaagacctgtggaactggtatctccacacgagttaccaatgacaaccctgagtgccgccttgtgaaagaaacccggatttgtgaggtgcggccttgtggacagccagtgtacagcagcctgaaaaagggcaagaaatgcagcaagaccaagaaatcccccgaaccagtcaggtttacttacgctggatgtttgagtgtgaagaaataccggcccaagtactgcggttcctgcgtggacggccgatgctgcacgccccagctgaccaggactgtgaagatgcggttccgctgcgaagatggggagacattttccaagaacgtcatgatgatccagtcctgcaaatgcaactacaactgcccgcatgccaatgaagcagcgtttcccttctacaggctgttcaatgacattcacaaatttagggactaaatgctacctgggtttccagggcacacctagacaaacaagggagaagagtgtcagaatcagaatcatggagaaaatgggcgggggtggtgtgggtgatgggactcattgtagaaaggaagccttgctcattcttgaggagcattaaggtatttcgaaactgccaagggtgctggtgcggatggacactaatgcagccacgattggagaatactttgcttcatagtattggagcacatgttactgcttcattttggagcttgtggagttgatgactttctgttttctgtttgtaaattatttgctaagcatattttctctaggcttttttccttttggggttctacagtcgtaaaagagataataagattagttggacagtttaaagcttttattcgtcctttgacaaaagtaaatgggagggcattccatcccttcctgaagggggacactccatgagtgtctgtgagaggcagctatctgcactctaaactgcaaacagaaatcaggtgttttaagactgaatgttttatttatcaaaatgtagcttttggggagggaggggaaatgtaatactggaataatttgtaaatgattttaattttatattcagtgaaaagattttatttatggaattaaccatttaataaagaaatatttacctaaaatctgagtgtatgccattcggtatttttagaggtgctccaaagtcattaggaacaacctagctcacgtactcaattattcaaacaggacttattgggatacagcagtgaattaagctattaaaataagataatgattgcttttataccttcagtagagaaaagtctttgcatataaagtaatgtttaaaaaacatgtattgaacacgacattgtatgaagcacaataaagattctgaagctaaaaaaaaaaaaaaaaaaaaaaaaaaaactcgta

SEQ ID NO: 591 - DNA, 1438 bp, Homo sapiens
acagaaggggagacgtggcgcagcgactcggaggttcgcctccagcttgcgcatcatctgcggccgggtcccgatgagcctcctgttgcctccgctggcgctgctgctgcttctcgcggcgcttgtggccccagccacagccgccactgcctaccggccggactggaaccgtctgagcggcctaacccgcgcccgggtagagacctgcgggggatgacagctgaaccgcctaaaggaggtgagtttgaaggaagaggtccctagctctgttccccctgagcctcttggggagtgggcaacatggtcccaatgactggggcggggaggggggaaggatccctaggctgagagtctagcctaggctgggagtctagcctgcacctgacttgctttatgacctcactgggcttcagtgtctcgtctgtacctcgagtagactgaggtcatggtctctgatgctctggttcctccccaggtgaaggctttcgtcacgcaggacattccattctagtatccttctgttctgggggaggggaaatgggatgggcacctgggagaatctccacgtaacttcagaaaggggtggcagatggttttcaactgacaattgaattgatyggtagtggctcccagaggattctgaggtggtctccatgttgggtgggcaagagagattgactagtgatgactgccacagaatggagaggagggccctttacttctttgaaccctaattttctcacgtataagcggaraccctggcccctcccgggcacagagtaagctctgagcaaaggaggcaatgctgttcccatcagtaaggctgcggaaaccaccacctccctctgcccaccaccccgctccttaacaccacctccagtcacaacctggtgatgaaacacctccctggggccgaccctgagctcgtgctgctgggccgcgctacgaggaactagaggtgaggccgtgggaggtgggctgggggcgaggccagakgcgaggyccagcctgctgaccccgcccctcctccgcctcagcgcatcccactcagtgaaatgacccgcgaagagatcaatgcgctagtgcaggagctcggcttctaccgcaaggcggcgcccgacgcgcaggtgccccccgagtacgtgtgggcgcccgcgaagcccccagaggaaacttcggaccacgctgacctgtaggtccgggggcgcggcggagctgggacctacctgcctgagtcctggagacagaatgaagcgctcagcatcccgggaatacttctcttgctgagagccgatgcccgtccccgggccagcagggatggggttggggaggttctcccaaccccactttcttccttccccagctccactaaattccctcctgccttaaaaaaaaaaaaaaaaaaaaaaaaaaaaaaaaaaaaaaaaagggcggccgc

SEQ ID NO: 592 - DNA, 1078 bp, Homo sapiens
ggagctcgcgcgcctgcaggtcgacactagtggatccaaagaattckgcacgagcacacctgkgcaggtggaagtggatgtggacgagcagcgcctggcggaaggtggtggggtctgctccttccacctgcaggcagccctgggggaaatgctgccctccccaccccccagggctctgagtgtggagggcaggggcaggaatggcgtccctcaggagccagcatggccctggagcccccgagtccctgaggaaagtgttgatgccctccagcatggggctccttctcatcctgtacgcccggctgccacccagcctggtgggccaggcaggcaggtggatagggtgggcaggccgggcaggggggcaggcggtcaggcagccctctcccacagtcctcatcgacggcgtggagtgcagcgacgtcaagttcttccagctggccgcgcagtggtcctcgcacgtgaagcacttccccatctgcatcttcggacactccaaggccaccttctagccccacccaccagggggcccacctcctgccccatgctgtgaggggcccagctgcatttctgttaacatttcagtttactacagagacagacgcttaaaacacaaagagaaacagtcttaagtatgaatgtgctcacaacgtggaaactaacgggggagctcctgccaggagccgaataactgctctgcttattaacccgaacgttcggcccggggctgggaagccagaaggacgatgctgagccatggatcgcggaaggcgtcctctggcctcaggagccacccagagcctcacaggctgagttcttgcctctgtgtcctgtccttcctggaagtcaggactctgcttcctcagggagcccggggaaggcggagctcagtggccacaggccgagggccatggggccgctcagtcccgttggggttgtcctgagttgagcctgggggggccgtcctgcccgcctaagagatgcccccagcaccgcacactcgtggttcccaataaactcctscctgcggcggaggttttatagcaaaaaaaaaaaaaaaaaaaacaaaaaaaaaaaa

SEQ ID NO: 593 - DNA, 2492 bp, Homo sapiens
  misc_feature (2113): n equals a,t,g, or c
  misc_feature (2452): n equals a,t,g, or c
tcgacccacgcgtccggcgaacttgggacccgctggcctcgctcggtgcgcgcctccctccccgcatgcagcccgccgagcgctcgcgggtccccaggatcgacccgtacggattcgagcggcctgaggacttcgacgacgccgcctacgagaagtttttctccagctacctggtcacgctcacccgcaggcgatcaaatggtcccggctgctgcagggcgggggcgtccccaggagccggacagtgaagcgctatgtccggaaaggggtcccgctggagcaccgtgcccgcgtctggatggtgctgagtggggcccargcgcaratggaccagaatcccggctactaccaccagcttctccagggagagagaaaccccaggctggaggacgccatcaggacagacctgaaccggaccttccccgacaacgtgaagttccggaagaccacggacccctgcttacagaggaccctgtacaatgtgctgctggcatatgggcaccataaccagggagtgggctactgccagggaatgaattttatagcaggatatctgattcttataacaaataatgaagaagaatctttttggctgttagatgctcttgttggaagaatactaccagattactacagcccggccatgctgggcctgaagaccgaccaggaggtcctcggggagctggtgcgggcgaagctgccggctgtgggggccctgatggagcgtctcggtgtgctgtggacgctgctggtgtcccgctggttcatctgcctgtttgtggacatcttgcccgtggagacagtgcttcggatctgggactgtttgkttaacgaaggctcgaagattatcttccgggtggccctgaccttaattaagcagcaccaggagttgattttggaagccaccagcgttccagacatttgcgataagtttaagcagataaccaaagggagtttcgtgatggagtgtcacacgtttatgcaggtgtgtggggctgcacgtggctcagtcccctcccagggggccccgcctcacctgcagcmcgggggctgctctgaccacccggagggtgcacaggaygggcaccagtgggcatagggcacaggatgagcctccagctctgtcctgcatctgccccctgcgcctggcctccgagggctttcctgtctatggcggcctgtcttcttggccctggcactgcggacgctgctcctggtcctaatggctgtactcatctgctgtgtgtggtgccagaagtgtggcttcccgaggcccggctycccactgggtcctggacctggcgcaggccgtayagactcaggtcctgatgagggcgttgtgggagctgtacctgacaggccttctgaggaagccaagacgccaggagaggctcaggcctgggagtcagtagtttcctaagagggagtggaggctcggggccactctgggtgcagcatggcaaacgtgggcggtatttcagcagctgggccttcatcaaagagaagaccatgttggccgggcgcggtggctcacgcctgcagtcccagcactttgggaggccaaggcgtgtggatcacctgaggtcaggagttcaagaccagcctggccaacacggtgaaaccccgtctctactaaaaaatacaaaaattagccaggtgtggtggctcacgcttatgtagtcccagttactcgggaggctgaggcacgagaatcacttgaacctgggagcggaggttgcagtgagccgagatcgcgccactgcactccagcctgggcaacagagtgagactctgtctcaaaaaaaaaaaaaaagtctaatggaagcagatggccttttcttccaccgtttgattcatttaacatttctgagcagcaaagctgcagtcytaggccccagggcaggagtgagatggtgacaatctgtgggtcaccccagaagcccttggatgtggactgctcctccctcacctcacacgaggcctgtctgtctgcctgccagtctgggagagctaacgtagaaatgggttgttgggtttgttttyaaactaactgtttgccttccagaaaatattttcagaacctggaagcttatccatggccaccgtcgccaangctccgcgagagctgcagggcccggctgctggcacaggggtgagcgtgcctgtcccctgcgttgctcgtctctacactgacgatgcccctttccagagttgacactggaccaactttcactgctttcctttttagtgttgtaaatacttgacatcrctacactttagttgtgaattttttaaaagagcagtttaaaatcaggtcattctaccagcttttgatgattagctatgaagtcatactttttaaagaaaacttatttttacctgagagatcaataatatataaaatgtgagtgtgggtttgtatctaataaagtatgccaacacctgtgtttgngatcagttctcagctgactggaaattaacatagtgagtgg

SEQ ID NO: 594 - DNA, 1904 bp, Homo sapiens
  misc_feature (1878): n equals a,t,g, or c
  misc_feature (1893): n equals a,t,g, or c
  misc_feature (1895): n equals a,t,g, or c
  misc_feature (1903): n equals a,t,g, or c
aatgaatgtaccggtccggaattccgggtcgacccacgcgtcgcgtccgccccgcgagcacagagcctcgcctttgccgatccgccgcccgtccacacccgccgccagctcaccatggatgatgatatcgccgcgctcgtcgtcgacaacggctccggcatgtgcaaggccggcttcgcgggcgacgatgccccccgggccgtcttcccctccatcgtggggcgccccaggcaccagggcgtgatggtgggcatgggtcagaaggattcctatgtgggcgacgaggcccagagcaagagaggcatcctcaccctgaagtaccccatcgagcacggcatcgtcaccaactgggacgacatggagaaaatctggcaccacaccttctacaatgagctgcgtgtggctcccgaggagcaccccgtgctgctgaccgaggcccccctgaaccccaaggccaaccgcgagaagatgacccagatcatgtttgagaccttcaacaccccagccatgtacgttgctatccaggctgtgctatccctgtacgcctctggccgtaccactggcatcgtgatggactccggtgacggggtcacccacactgtgcccatctacgaggggtatgccctcccccatgccatcctgcgtctggacctggctggccgggacctgactgactacctcatgaagatcctcaccgagcgcggctacagcttcaccaccacggccgagcgggaaatcgtgcgtgacattaaggagaagctgtgctacgtcgccctggacttcgagcaagagatggccacggctgcttccagctcctccctggagaagagctacgagctgcctgacggccaggtcatcaccattggcaatgagcggttccgctgccctgaggcactcttccagccttccttcctgggcatggagtcctgtggcatccacgaaactaccttcaactccatcatgaagtgtgacgtggacatccgcaaagacctgtacgccaacacagtgctgtctggcggcaccaccatgtaccctggcattgccgacaggatgcagaaggagatcactgccctggcacccagcacaatgaagatcaagatcattgctcctcctgagcgcaagtactccgtgtggatcggcggctccatcctggcctcgctgtccaccttccagcagatgtggatcagcaagcaggagtatgacgagtccggcccctccatcgtccaccgcaaatgcttctaggcggactatgacttagttgcgttacaccctttcttgacaaaacctaacttgcgcagaaaacaagatgagattggcatggctttatttgttttttttgttttgttttggttttttttttttttttggcttgactcaggatttaaaaactggaacggtgaaggtgacagcagtcggttggagcgagcatcccccaaagttcacaatgtggccgaggactttgattgcacattgttgtttttttaatagtcattccaaatatgagatgcrttgttacaggaagtcccttgccatcctaaaagccaccccacttctctctaaggagaatggcccagtcctctcccaagtccacacaggggaggtgatagcattgctttcgtgtaaattatgtaatgcaaaatttttttaatcttcgccttaatacttttttattttgttttattttgaatgatgagccttcgtgcccccccttcccccttttttgtcccccaacttgagatgtatgaaggcttttggtctccctgggagtgggtggaggcagccagggcttacctgtacactgacttgagaccagttgaataaaagtgcacaccttaaaaaaaaaaaaaaaaaaaaaaaaaaaaaaaaaaaaaaaaaaanaggggggggcccccnanggggcccna

SEQ ID NO: 595 - DNA, 337 bp, Homo sapiens
ctagttctagatcgcgagcggcgccctttttttttttytttgttaagtcgttccctctacaaaggacttcctagtgggtgtgaaaggcagcggtggccacagaggcggcggagagatggccttcagcrgttcccaggctccctacctgagtccagctgtccccttttctgggactattcaaggaggtctccaggacggacttcagatcactgtcaatgggaccgttctcagctccagtggaaccagtggaaatgacattgccttccacttcaaccctcggtttgaagatggagggtacgtggtgtgcacagcaggcagaacggaagctggggggccc

SEQ ID NO: 596 - DNA, 1288 bp, Homo sapiens
  misc_feature (1283): n equals a,t,g, or c
  misc_feature (1285): n equals a,t,g, or c
  misc_feature (1287): n equals a,t,g, or c
gcctccgccccctcaaccttcgcggggcgcgggccgcagcttttcggttcacagcgggcagggaaagccgcgggaagggtactccaggcgagaggcggacgcgagtcgtcgtggcaggaaaagtgactagctccccttcgttgtcagccagggacgagaacacagccacgctcccacccggctgccaacgatccctcggcggcgatgtcggccgccggtgcccgaggcctgcgggccacctaccaccggctcctcgataaagtggagctgatgctgcccgagaaattgaggccgttgtacaaccatccagcaggtcccagaacagttttyttctgggctccaattatgaaatgggggttggtgtgtgctggattggctgatatggccagacctgcagaaaaacttagcacagctcaatctgctgttttgatggctacagggtttatttggtcaagatactcacttgtaattattccaaaaaattggagtctgtttgctgttaatttctttgtgggggcagcaggagcctctcagctttttcgtatttggagatataaccaagaactaaaagctaaagcacacaaataaaagagttcctgatcacctgaacaatctagatgtggacaaaaccattgggacctagtttattatttggttattgataaagcaaagctaactgtgtgtttagaaggcactgtaactggtagctagttcttgattcaatagaaaaatgcagcaaacttttaataacagtctctctacatgacttaaggaacttatctatggatattagtaacatttttctaccatttgtccgtaataaaccatacttgctcgtatataccccctgcctccttctgttccagtcagccaacatatgtacataaaagaacacacaaattcaagaagttggaagattaaattatctgcttatttagtgtaggatggtcaggtagctagctataagtgaaaggaaattttgctgaagagactgagaaatgggtagtggaatgactatcaagatgacctcaaactatttaaaaacattttaacttgccatgaagaatcttgatgatttttgtataaatgttgtataaaattcttttacagctacagatttttaaataggatcattgtaargattaatgagataatgttttaacatagtgcctgggtccatgataagtgttaaatttttcaattaccctcagtaactgataatgtagcaagaaaatactctatattcagacagacctgaatttgatcccagctctatactaccntngna

SEQ ID NO: 597 - DNA, 1052 bp, Homo sapiens
  misc_feature (937): n equals a,t,g, or c
  misc_feature (943): n equals a,t,g, or c
  misc_feature (995): n equals a,t,g, or c
  misc_feature (1004): n equals a,t,g, or c
  misc_feature (1009): n equals a,t,g, or c
  misc_feature (1040): n equals a,t,g, or c
  misc_feature (1051): n equals a,t,g, or c
agcgcctgcaggtcgacactagtggatccaaagaattcgtgcacgtggaaaaaccaatctgagaagaacaacctaccttgtccttgatgaagcagatagaatgcttgatatgggctttgaaccccaaataaggaagattgtggatcaaataagacctgataggcaaactctaatgtggagtgcgacttggccaaaagaagtaagacagcttgctgaagatttcctgaaagactatattcatataaacattggtgcacttgaactgagtgcaaaccacaacattcttcagattgtggatgtgtgtcatgacgtagaaaaggatgaaaaacttattcgtctaatggaagagatcatgagtgagaaggagaataaaaccattgtttttgtggaaaccaaaagaagatgtgatgagcttaccagaaaaatgaggagagatgggtggcctgccatgggtatccatggtgacaagagtcaacaagagcgtgactgggttctaaatgaattcaaacatggaaaagctcctattctgattgctacagatgtggcctccagagggctagatgtggaagatgtgaaatttgtcatcaattatgactaccctaactcctcagaggattatattcatcgaattggaagaactgctcgcagtaccaaaacaggcacagcatacactttctttacacctaataacataaagcaagtgagcgaccttatctctgtgcttcgtgaagctaatcaagcaattaatcccmagttgcttcagttggtcgaagacagaggttcaggtcgttccaggggtagaggaggcatgaaggatgaccgtcgggacagatactctgcgggcaaaaggggtggatttaatacctttagagacagggaaaattatgacagaggttactctagcctgcttaaaagagattttggggcaaaaactcanaatggnggttacagtgcttgcaaattcaccaatgggagctttggaagtaattttgggncttgctggnattcnggaccagttttaggactgggaattccaacangggccttaccnc

SEQ ID NO: 598 - DNA, 2093 bp, Homo sapiens
  misc_feature (969): n equals a,t,g, or c
  misc_feature (1422): n equals a,t,g, or c
  misc_feature (1425): n equals a,t,g, or c
  misc_feature (1481): n equals a,t,g, or c
ccgccgccatgggaccacgtggggtaagctgggttgagagcagcgggcgccgttaaggagctgcagagtcacgtctgtgcaaagactgcaccagagcccttctgtgtcacggcgggctgtgcacccatgcacacacctacgcacacacaacactccgcactgcagtatattcttgccaaagatttcctttaaaagcaagcacttttactaattattattttgtaaatgtttatcttcttctgtcttctccctccctgaatctattttactgttgtttattgttgaatctgtgtgtcagccaggagagcgctgtctggccttgaacatgggctgggatgggaaagggtctgggagaagatgggcaacaaagagccagggagtcatggacatcgcagcgacgcagaccccagcaggttcagtcccgtgctgccaccagctgtccagctgggtgtctggagggaagagggcagaggagggtcatgtcccttcagctgggggaggggcccagtgagctccacgtggctttttcccaaagggagcaagagggaaggattgggcgagaaaacaatggagaggggacctgcgaaggaaaacagggaggaagtgagcggtttgatcagcctgctatcacggtgttctggctctcttatttagccaggcgcttaagggacagatacatcacatcctaagtttgggaaaggcctttgacccatgtcatctgagcgtctcctccagtagctctgaaagctgtggacaccaatggccaggattccttctcccctggtttttgaggatccctgggtcttctgagactggccaggagagggatggtggggccagtggttgtgtgaaagcaggaggggcagccctcctggacaagtgtgatccccctataaacggctctcaggaggttagtgagtaggagattctgccttgttctgatgagcctgtgcaggggctccaggggancatgctgtccagggggcacagaagggtggtgagtgtgatcaaatctagtctcactcccactttttagtctcactcctacttttgtccaccacccctgcctcctggatcttctcccactttttttttcagctttaggacctggggagatcctgtgagtcaaggcagacacccaatcctgcccccacactcggggtcctccaagaggttggggggcagagtcccagagcagccctttaccccaggtccaggccctggaatcctgagactcgcgtttccttggccagtggtaacacaggacgtgtgtgcgcatgtgcaagtgtggatgtatgtgtgtgcgtgtgttttgctcatttctttagggaacttgggagtcggggttggaggtgctgggcaatggaacttcaaattcaatgtcgcccagcagtgaggggagtcgggaggtgaggcctgtangcnaaccaattggtggagtctcagcgatacccaggtgagaagtggttcacccagagggncagggtgggggcctcgggcagatctgtccctcttggcccctctgtcctcaaatgtccaaaatgttggaggacctctgttcatatcccacgcctgggctcttgccagcagtggagttactgtagagggatgtcccaagcttgttttccaatcagtgttaagctgtttgaaactctcctgtgtctgtgttttgtttgtgcgtgtgtgtgagagcacatcagtgtgtgcaggctgtgtttccccatttctctcctcccttcagacccatcattgagaacaaatgtaagaaatcccttcccaccaccctccctgcctcccaggccctctgcgggggaaacaagatcacccagcatccttccccaccccagctgtgtatttatatagatggaaatatactttatattttgtatcatcgtgcctatagccgctgccaccgtgtataaatcctggtgtmtgctccttatcctggacatgaatgtattgtacactgacgcgtccccactcctgtacagctgctttgtttctttgcaatgcattgtatggctttataaatgataaagttaaagaaaaaaaaaaaaaaaaaaaaaaaaaaaaaaaaaaaaaaaaaaaaaaaa

SEQ ID NO: 599 - DNA, 562 bp, Homo sapiens
  misc_feature (349): n equals a,t,g, or c
  misc_feature (383): n equals a,t,g, or c
  misc_feature (437): n equals a,t,g, or c
  misc_feature (445): n equals a,t,g, or c
  misc_feature (473): n equals a,t,g, or c
  misc_feature (524): n equals a,t,g, or c
  misc_feature (549): n equals a,t,g, or c
  misc_feature (561): n equals a,t,g, or c
  misc_feature (562): n equals a,t,g, or c
gcttactgcagcctcgatcttctgggttcaagtgatcttctgcctcagcctctcgtgtacctgaggccacaggcacacaccgccacacctggctaatttttattattttttttgtagagacgaggtctcactatgcccaggttggtctcaaactcctgtgctcaagcaatcctcccatcttggctccctaagtgctgggattataggcatgagccaccgtgcccggcctcatgtctgcatgttaaaagttctgagaattcctatggaaaataaatttgactttgcttaatgcagttcctctaaacttacttaattcctttttctttttttctttactatttattaattnttctcttttctcagaccttgcagggatgaaaggnccccttttctcaaaaccctcttatgatctctacactctgcaagggcttctgaangacagcangctgagaaaggccgatcctaacacttanctctttgaagacacttttaaaactggtaacagtatttatagctttaaaagnacccatggttcttaaggcccgttantaaaaaaaaaann

SEQ ID NO: 600 - DNA, 528 bp, Homo sapiens
  misc_feature (1): n equals a,t,g, or c
  misc_feature (2): n equals a,t,g, or c
  misc_feature (8): n equals a,t,g, or c
  misc_feature (9): n equals a,t,g, or c
  misc_feature (11): n equals a,t,g, or c
  misc_feature (104): n equals a,t,g, or c
  misc_feature (417): n equals a,t,g, or c
  misc_feature (444): n equals a,t,g, or c
  misc_feature (458): n equals a,t,g, or c
  misc_feature (493): n equals a,t,g, or c
  misc_feature (507): n equals a,t,g, or c
nngcaagnngncaccaaccctcactaaagggaacaaaagctggagctccaccgcggtgcggccgctctagaactagtggatcccccgggctgcaggaattcggnacgagggaggctgaggctggagtgcagtggtgtgatctcggctcactgcaacctctgcctcccaggttccagcaattctcctgcctcagcctccctagtggctgggatgacaggcgcctgccatcatgcctgactagtttttgtatttttagtagagacggcgtttcaccatgttggccaggctggtctcaaactcctgacctcaggtgatccgcctacctcagcctcccaaagtgctgggattacaggcgtgatccaccacacctggcccttgcaatcttctactttaaggtttgcagagataaaccaatanatccacaccgtacatctgcaatatganttcaagaaaggaantagtaccttcaatacttaaaaatagtcttccacanaaaatactttattnctgatctatacaaattttcag

SEQ ID NO: 601 - DNA, 475 bp, Homo sapiens
  misc_feature (145): n equals a,t,g, or c
  misc_feature (160): n equals a,t,g, or c
  misc_feature (172): n equals a,t,g, or c
  misc_feature (174): n equals a,t,g, or c
  misc_feature (185): n equals a,t,g, or c
  misc_feature (191): n equals a,t,g, or c
  misc_feature (199): n equals a,t,g, or c
  misc_feature (212): n equals a,t,g, or c
  misc_feature (218): n equals a,t,g, or c
  misc_feature (250): n equals a,t,g, or c
  misc_feature (297): n equals a,t,g, or c
  misc_feature (302): n equals a,t,g, or c
  misc_feature (306): n equals a,t,g, or c
  misc_feature (341): n equals a,t,g, or c
  misc_feature (389): n equals a,t,g, or c
  misc_feature (413): n equals a,t,g, or c
  misc_feature (444): n equals a,t,g, or c
  misc_feature (450): n equals a,t,g, or c
  misc_feature (468): n equals a,t,g, or c
gcctacacgccgccgcttgtgctgcagccatgtctctagtgatccctgaaaagttccagcatattttgcgagtactcaacaccaacatcgatgggcggcggaaaatagcctttgccatcactgccattaagggtgtgggccgaanatatgctcatgtggngttgaggaaagnanacattgacctnaccaanagggcggnagaactcactgangatgangtggaacgtgtgatcaccattatgcagaatcnacgccagtacaagatcccagactggttcttgaacagacagaatgatngtaangatnaatctacttcaagctaacatgctatcatttctacnttgagtactgctaaggtttctttccacaacttgtacacaatgttattnactgcccagtttataatttccctnttggttcccattttaagacttatttaattantatgcnttttaaatttttgagacntgataga

SEQ ID NO: 602 - DNA, 288 bp, Homo sapiens
  misc_feature (84): n equals a,t,g, or c
  misc_feature (100): n equals a,t,g, or c
cacattctcaggaactctccttctttggggagcctcagatgggaagggactcgagccccacctgtccctggactctggaatgtntggctgaagttgaggntctcttactctctaggccacggaattaacccgagcaggcatggaggcctctgctctcacctcatcagcagtgaccagtgtggccaaagtggtcagggtggcctctggctctgccgtagttttgcccctggccaggattgctacagttgtgattggaggagttgtggccatggcggctgtgcccatggt

SEQ ID NO: 603 - DNA, 432 bp, Homo sapiens
  misc_feature (365): n equals a,t,g, or c
  misc_feature (408): n equals a,t,g, or c
  misc_feature (416): n equals a,t,g, or c
  misc_feature (421): n equals a,t,g, or c
  misc_feature (425): n equals a,t,g, or c
ggcgccccggagagctcttgcgcgtcttgttcttgcctggtgtcggtggttagtttctgcgacttgtgttgggactgctgataggaagatgtcttcaggaaatgctaaaattgggcaccctgcccccaacttcaaagccacagctgttatgccagatggtcagtttaaagatatcagcctgtctgactacaaaaggaaaatatgttgtgttcttcttttaccctcttgacttcacctttgtgtgccccacggagatcattgctttcagtgatagggcagaagaatttaagaaactcaactgccaagtgattggtgcttctgtggattctcacttctgtcatctagcatgggtcaatacacctaanaaacaaggaggactgggacccatgaacattcctttggtatcanacccaacncacanttgntcaggat

SEQ ID NO: 604 - DNA, 371 bp, Homo sapiens
  misc_feature (282): n equals a,t,g, or c
  misc_feature (291): n equals a,t,g, or c
atttagtgtgataaggagaagaacctgctgcatgtcacagacaccggtgtaggaatgaccagagaagagttggttaaaaaccttggtaccatagccaaatctgggacaagcgagtttttaaacaaaatgactgaagcacaggaagatggccagtcaacttctgatttgattggccagtttggtgtcggtttctattccgccttccttgtagcagataaggttattgtcacttcaaaacacaacaacgatacccagcacatctgggagtctgactccaatganttttctgtnaattgctgacccaagagggaaacactctaggacgggggaacgacaatttacgtggagtatggaccaatttccttattaag

SEQ ID NO: 605 - DNA, 392 bp, Homo sapiens
  misc_feature (292): n equals a,t,g, or c
  misc_feature (322): n equals a,t,g, or c
  misc_feature (330): n equals a,t,g, or c
  misc_feature (331): n equals a,t,g, or c
  misc_feature (342): n equals a,t,g, or c
  misc_feature (363): n equals a,t,g, or c
ggcacagccggcatcgtggtgtgttcttgactccgctgctcgccatgtcttctcacaagactttcaggattaagcgattcctggccaagaaacaaaagcaaaatcgtcccattccccagtggattcggatgaaaactgggaaataaaatcaggtacaactccaaaaggagacattggagaagaaccaagctgggtctatgaaggaattgcacatgagatggcacacatatttatgctgtctggaaggtgcacgatccatgttaccatatgcaagctggaaaatgtgcaccantatctgggagattttcgacgtgtttttccnctctggannctgtttatggnacaaggttggtttggtttggntccattaaattaaattaggtaaaggcccc

SEQ ID NO: 606 - DNA, 442 bp, Homo sapiens
  misc_feature (255): n equals a,t,g, or c
  misc_feature (312): n equals a,t,g, or c
  misc_feature (368): n equals a,t,g, or c
gcgtcttcagggtggaagcctggcgcacgtccggagagacacccgccatttcacccagtaagcgggcccggcctgcggaggtgggcggcatgcagctccgctttgcccggctctccgagcacgccacggcccccacccggggctccgcgcgcgccgcgggctacgacctgtacagtgcctatgattacacaataccacctatggagaaagctgttgtgaaaacggacattcagatagcgctcccttctgggtgtnatggaagagtggctccacggtcaggcttggctgcaaaacactttattgatgtaggantggtgtcatagatgaagattataagaggaatgttggtgttgtactgtttaattttnggcaagaaagtttgaagtcaaaaaaggtgatcgaattgcacagtcatttgcaacggattttttatccagaaata

SEQ ID NO: 607 - DNA, 182 bp, Homo sapiens
  misc_feature (53): n equals a,t,g, or c
  misc_feature (124): n equals a,t,g, or c
  misc_feature (132): n equals a,t,g, or c
gcaccatggcggttggcaagaacaagcgccttacgaaaggcggcaaaaagggngccaagaagaaagtggttgatccattttttaagaaagattggtatgatgtgaaagcacctgctatgttcantataaganatattggaaagacgctcgtcaccaggacccaaggaaccaaaattgcatct

SEQ ID NO: 608 - DNA, 673 bp, Homo sapiens
  misc_feature (1): n equals a,t,g, or c
  misc_feature (2): n equals a,t,g, or c
  misc_feature (561): n equals a,t,g, or c
  misc_feature (569): n equals a,t,g, or c
  misc_feature (603): n equals a,t,g, or c
  misc_feature (604): n equals a,t,g, or c
  misc_feature (627): n equals a,t,g, or c
  misc_feature (630): n equals a,t,g, or c
  misc_feature (652): n equals a,t,g, or c
nncaaaattaaccccctaataaaattaattaaccactcactcatcgacctccccaccccatccaacatctccgcatgatgaaacttcggctcactccttggcgcctgcctgatcctccaaatcaccacaggactattcctagccatgcactactcaccagacgcctcaaccgccttttcatcaatcgcccacatcactcgagacgtaaattatggctgaatcatccgctgccttcacgccaatggcgcctcaatattctttatctgcctcttcctacacatcgggcgaggcctatattacggatcatttctctactcagaaacctgaaacatcggcattatcctcctgcttgcaactatagcaacagccttcataggctatgtcctcccgtgaggccaaatatcattctgaggggccacagtaattacaaacttactatccgccatcccatacattgggacagacctagttcaatgaatctgaggaggctactcagtagacagtcccaccctcacacgattctttacctttcacttcatcttgcccttcattattggcagncctacagnactcacctctattttttgccgaaacggggatcanncaacccccttagggaatcacctnccntttccgataaaaatcaaccttncaccctttactacacaatcat

SEQ ID NO: 609 - DNA, 553 bp, Homo sapiens
  misc_feature (377): n equals a,t,g, or c
  misc_feature (449): n equals a,t,g, or c
  misc_feature (497): n equals a,t,g, or c
  misc_feature (536): n equals a,t,g, or c
  misc_feature (545): n equals a,t,g, or c
gcggacgcgtgggttttaatacaaatgttatttatagtttacaatgaatgcactgcataaaaacttttggacgacaatgggaacattgctgaagaactgagcattctcaaatggaacacagacagtgtagaagaattcctgagtgaaaagttggaacgcatataaatcttgcttaaattttgtcctatccttttgttaccttatcaaatgaaatattacagcacctagaaaataatttagttttgcttgcttccattgatcagtcttttacttgaggcattaaatatctaattaaatcgtgaaatggcagtatagtccatgatatctaaggagttggcaagcttaacaaaacccattttttataaatgtccatcctnctgcatttgttgataccactaacaaaatgctttgtaacagacttgcggttaattatgcaaatgatagtttgngataattggggccaagttttacgaacaacagatttctaaattagaganggttaccaggacagatgatactatgcctaagggctgggngcccttttnaaggaaga

SEQ ID NO: 610 - DNA, 458 bp, Homo sapiens
  misc_feature (17): n equals a,t,g, or c
  misc_feature (18): n equals a,t,g, or c
  misc_feature (215): n equals a,t,g, or c
  misc_feature (225): n equals a,t,g, or c
  misc_feature (281): n equals a,t,g, or c
  misc_feature (312): n equals a,t,g, or c
  misc_feature (314): n equals a,t,g, or c
  misc_feature (316): n equals a,t,g, or c
  misc_feature (344): n equals a,t,g, or c
  misc_feature (369): n equals a,t,g, or c
  misc_feature (412): n equals a,t,g, or c
  misc_feature (430): n equals a,t,g, or c
  misc_feature (442): n equals a,t,g, or c
  misc_feature (456): n equals a,t,g, or c
acccacgcgtccggctnnccgatgagaccaatatatgcaatggtaagccagtagatggactgactactttgcgcaatgggacattagttgcattccgaggtcattatttctggatgctaagtccattcagtccaccatctccagctcgcagaattactgaagttttggggaatcctttcccccattgatactgttttactaaggggaatttttcnagaaaaggtngcagcattcagcagtatatttataaacaggaacctgtacagaagtgcccttggaanaaggcctgctctaaaattatccagtggtatngngnaacgacacaggttaagagacgtcgcttnaacgtgctaaaaggacctttccaanacacaccatcagaatccataatcacctgccaaatggggtatcnagaccaaggggcctccanaaggagttaagnggttaccgtggggngg

SEQ ID NO: 611 - DNA, 565 bp, Homo sapiens
  misc_feature (5): n equals a,t,g, or c
  misc_feature (8): n equals a,t,g, or c
  misc_feature (469): n equals a,t,g, or c
  misc_feature (471): n equals a,t,g, or c
  misc_feature (534): n equals a,t,g, or c
aagcnganaccaaccctcactaaagggaacaaaagctggagctccaccgcggtgcggccgctctagaactagtggatcccccgggctgcaggaattcggcacgaggttgcagtgagccgagatcgcaccattgcactccagtctgggcaacagagtgagattccgtctcaaaaaaaaaaagaaaaggaaaaaaaaatagcattatacctcttccttgtctcaaccgccatgaaaattctgaacactccaaattcagttgaataatccaaaacaaaatttataagtataaaataattttacttcttatagtaatagtatactttaaaaagcctcagggtatattatcttctaaacagctacaattcagtgcagctacattaaccaactatgttctctagttgaggaacaactaggcctatttcactgctgtgtagcctcagtgcctaacatgggtgccaaataaatattngnggattacactgaattgtaaaaaccattcgtttttgtttacaattgccaaaaatctcaaaaggncctgtatttatgtaattctttgaaattatta

SEQ ID NO: 612 - DNA, 442 bp, Homo sapiens
  misc_feature (229): n equals a,t,g, or c
  misc_feature (253): n equals a,t,g, or c
  misc_feature (294): n equals a,t,g, or c
  misc_feature (297): n equals a,t,g, or c
  misc_feature (319): n equals a,t,g, or c
  misc_feature (328): n equals a,t,g, or c
  misc_feature (333): n equals a,t,g, or c
  misc_feature (365): n equals a,t,g, or c
  misc_feature (413): n equals a,t,g, or c
  misc_feature (415): n equals a,t,g, or c
  misc_feature (440): n equals a,t,g, or c
  misc_feature (441): n equals a,t,g, or c
gaccagggttgctccgtccgtgctccgcctcgccatgacttcctacagctatcgccagtcgtcggccacgtcgtccttcggaggcctgggcggcggctccgtgcgtattgggccgggggtcgcttttcgcgcgcccagcattcacgggggctccggcggccgcggcgtatccgtgtcctccgcccgctttgtgtcctcgtcctcctcggggggctacggcggcggctanggcggcgtcctgaccgcgtccgangggctgctggcgggcaacgagaagctaaccatgcagaactnaangaccgcttggcttctactgganaagttcgcncctgnaggggcaaagggaactaaaagttaaatccgcnattgtacaaaacagggcttggccttcccggataaagcattataaagancntcaggaattggggaaaaatttttgnnc

SEQ ID NO: 613 - DNA, 306 bp, Homo sapiens
  misc_feature (5): n equals a,t,g, or c
  misc_feature (102): n equals a,t,g, or c
  misc_feature (129): n equals a,t,g, or c
  misc_feature (172): n equals a,t,g, or c
  misc_feature (185): n equals a,t,g, or c
  misc_feature (190): n equals a,t,g, or c
  misc_feature (192): n equals a,t,g, or c
  misc_feature (199): n equals a,t,g, or c
  misc_feature (213): n equals a,t,g, or c
  misc_feature (237): n equals a,t,g, or c
  misc_feature (272): n equals a,t,g, or c
  misc_feature (299): n equals a,t,g, or c
  misc_feature (302): n equals a,t,g, or c
ggcanaggagaactccaggattgtcctgcagatcgacaacgcccgtttggctgcagatgacttccgaaccaagtttgagacggaacaggctctgcgcatgancgtggaggccgacatcaacggcctgcncaggtgctggatgagctgaccctggcccagaaccgaccttggngatgcagttcgangcctnangaagagntggcctacctaagnaggaccctgagggggaatcaattncgttaaggggccaatgggaggccattaattttganttggttccttccggaccttttggccantcntgtt

SEQ ID NO: 614 - DNA, 555 bp, Homo sapiens
  misc_feature (392): n equals a,t,g, or c
  misc_feature (409): n equals a,t,g, or c
  misc_feature (433): n equals a,t,g, or c
  misc_feature (497): n equals a,t,g, or c
  misc_feature (543): n equals a,t,g, or c
  misc_feature (545): n equals a,t,g, or c
ggcgactacagccactactacacgaccatccaggacctgcgggacaagattcttggtgccaccattgagaactccaggattgtcctgcagatcgacaatgcccgtctggctgcagatgacttccgaaccaagtttgagacggaacaggctctgcgcatgagcgtggaggccgacatcaacggcctgcgcagggtgctggatgagctgaccctggccaggaccgacctggagatgcagatcgaaggcctgaaggaagagctggcctacctgaagaagaaccatgaggaggaaatcagtacgcttaggggccaagtgggaggccaggtcagtgtggaggtggattccgctccgggcaccgatctcgccaagatcctgagtgacatgcgaagccnatatgaggtcatggccnagcagaaccggaaggatgcttaancctggtcaccagcccggactgaagaattgaacccggaggtcgcttgccacacggagcaacttcngatgagcaggtccaaggttactgacctgcggcgcaacccttaaggncntgagaatgaa

SEQ ID NO: 615 - DNA, 575 bp, Homo sapiens
  misc_feature (4): n equals a,t,g, or c
  misc_feature (28): n equals a,t,g, or c
  misc_feature (57): n equals a,t,g, or c
  misc_feature (173): n equals a,t,g, or c
tganagaaattaaccctcactaaagggnacaaaagctggagctccaccgcggtgcgnccgctctagaactagtggatcccccgggctgcaggaattcggcacgaggctaaggctgcgttggggtgaggccctcacttcatccggcgactagcaccgcgtccggcagcgccagncctacactcgcccgcgccatggcctctgtctccgagctcgcctgcatctactcggccctcattctgcacgacgatgaggtgacagtcacggaggataagatcaatgccctcattaaagcagccggtgtaaatgttgagcctttttggcctggcttgtttgcaaaggccctggccaacgtcaacattgggagcctcatctgcaatgtaggggccggtggacctgctccagcagctggtgctgcaaccagcaggaggtcctgccccctccactgctgctgctccagctgaggagaagaaagtggaagcaaagaaagaagaatccgaggagtctgatgatgacatgggctttggtctttttgactaaacctcttttataacatgttcaataaaaagctgaacttt

SEQ ID NO: 616 - DNA, 346 bp, Homo sapiens
  misc_feature (117): n equals a,t,g, or c
  misc_feature (139): n equals a,t,g, or c
ctcgtgccgaattcggcacgagccgccgcctccgccgcagacgccgccgcgatgcgctacgtcgcctcctacctgctggctgccctagggggcaactcctcccccagcgccaagggnatcaagaagatcttggacaacntgggtatcgaggcggacgacgaccggctcaacaaggttatcagtgagctgaatggaaaaaacattgaagacgtcattgcccagggtattggcaagcttgccagtgtacctgctggtggggctgtagccgtctctgctgccccaggctctgcagcccctgctgctggttctgcccctgctgcagcagaggagaagaaagatgagaaga

SEQ ID NO: 617 - DNA, 409 bp, Homo sapiens
  misc_feature (356): n equals a,t,g, or c
  misc_feature (380): n equals a,t,g, or c
  misc_feature (388): n equals a,t,g, or c
  misc_feature (397): n equals a,t,g, or c
  misc_feature (408): n equals a,t,g, or c
gggcagggctgagccagcgacgccctccattcactctccgcgcccgttctccggctgtcctcccgttccgctgcccgccctgccaccatgacggaacaggccatctccttcgccaaagacttcttggccggaggcatcgccgccgccatctccaagacggccgtggctccgatcgagcgggtcaagctgctgctgcaggtccagcacgccagcaagcagatcgccgccgacaagcagtacaagggcatcgtggactgcattgtccgcatccccaaggagcagggcgtgctgtccttctggaggggcaaccttgccaacgtcattcgctacttccccactcaagccctcaacttcgncttcaaggataagtacaagcagancttcctgnggggcgtgnacaagcacacnc

SEQ ID NO: 618 - DNA, 473 bp, Homo sapiens
  misc_feature (5): n equals a,t,g, or c
  misc_feature (9): n equals a,t,g, or c
  misc_feature (25): n equals a,t,g, or c
  misc_feature (241): n equals a,t,g, or c
  misc_feature (256): n equals a,t,g, or c
  misc_feature (322): n equals a,t,g, or c
  misc_feature (337): n equals a,t,g, or c
  misc_feature (352): n equals a,t,g, or c
  misc_feature (359): n equals a,t,g, or c
  misc_feature (360): n equals a,t,g, or c
  misc_feature (365): n equals a,t,g, or c
  misc_feature (368): n equals a,t,g, or c
  misc_feature (416): n equals a,t,g, or c
  misc_feature (436): n equals a,t,g, or c
  misc_feature (442): n equals a,t,g, or c
  misc_feature (446): n equals a,t,g, or c
  misc_feature (470): n equals a,t,g, or c
ggcanagcncaaagacaggcttttnagattggatctccgtggcgtactatggatgcttccgagagggggcgactattatacaagttggcaagttgatcaaagaagctgccgggaaaagcaatctgaagagggtgaccctggagcttggaggaaagagcccttgcattgtgttagctgatgccgacttggacaatgctgttgaatttgcacaccatggggtattctaccaccagggccagtnttgtatagccgcatncaggatttttgtggaagaatcaatttatgatgagtttgttcgaaggagtgttgagcgggttaagantatatccttgggaantcctttgaccccagnagttcanncaagnccntcagattgacaaggaccatttggtaaatacttgaccccattgagagtnggaagaaagaaggggccaantggatntggnggaggccctgggggataaaggtanttg

SEQ ID NO: 619 - DNA, 604 bp, Homo sapiens
  misc_feature (5): n equals a,t,g, or c
  misc_feature (371): n equals a,t,g, or c
  misc_feature (440): n equals a,t,g, or c
  misc_feature (492): n equals a,t,g, or c
  misc_feature (500): n equals a,t,g, or c
  misc_feature (537): n equals a,t,g, or c
  misc_feature (554): n equals a,t,g, or c
  misc_feature (584): n equals a,t,g, or c
  misc_feature (587): n equals a,t,g, or c
  misc_feature (593): n equals a,t,g, or c
cgacnttcccctactaaagggaacaaaagctggagctccaccgcggtggcggccgctctagaactagtggatcccccgggctgcaggaattcggcacgaggtggtccccctggcagggacaaatggcgagactaccacccaagggttggatgggctgtctgagcgctgtgcccagtacaagaaggacggagctgacttcgccaagtggcgttgtgtgctgaagattggggaacacaccccctcagccctcgccatcatggaaaatgccaatgttctggcccgttatgccagtatctgccagcagaatggcattgtgcccatcgtggagcctgagatcctccctgatggggaccatgacttgaagcgcttgncagtatgtgaccgaaaaggtgcttggcttgctgctacaaggctcttgagtgaccaccacatctacctgnaaggcaccttgctgaagcccaacatggtcccccaggccatgcttgcactcanaagttttnttatgaaggagattgcccatggcgaacccgtctcaancgctgtgcccgcacaantgcccccccgcttgtcacttgggatcaacnttncctgtnttggaaggcca

SEQ ID NO: 620 - DNA, 312 bp, Homo sapiens
  misc_feature (2): n equals a,t,g, or c
  misc_feature (41): n equals a,t,g, or c
  misc_feature (307): n equals a,t,g, or c
  misc_feature (309): n equals a,t,g, or c
  misc_feature (310): n equals a,t,g, or c
  misc_feature (311): n equals a,t,g, or c
  misc_feature (312): n equals a,t,g, or c
gngccaacagccttgcctgtcaaggaaagtacactccgagnggtcaggctggggctgctgccagcgagtccctcttcgtctctaaccacgcctattaagcggaggtgttcccaggctgcccccaacactccaggccctgccccctcccactcttgaagaggaggccgcctcctcggggctccaggctggcttgcccgcgctctttcttccctcgtgacagtggtgtgtggtgtcgtctgtgaatgctaagtccatcaccctttccggcacactgccaaataaacagctatttaagggggaaaaaaanannnn

SEQ ID NO: 621 - DNA, 248 bp, Homo sapiens
  misc_feature (141): n equals a,t,g, or c
  misc_feature (193): n equals a,t,g, or c
  misc_feature (195): n equals a,t,g, or c
  misc_feature (198): n equals a,t,g, or c
  misc_feature (207): n equals a,t,g, or c
  misc_feature (246): n equals a,t,g, or c
gatgattgtgaattcaaggctgaaggaaatagcaaattcacctacacagttctggaggatggttgcacgaaacacactggggaatggagcaaaacagtctttgaatatcgaacacgcaaggctgtgagactacctattgtngatattgcaccctatgacattggtggtcctgatcaagaatttggtgtggacntnggncctgtttgntttttataaaccaaactctatctgaaatcccaacaaaanaa

SEQ ID NO: 622 - DNA, 344 bp, Homo sapiens
  misc_feature (4): n equals a,t,g, or c
  misc_feature (19): n equals a,t,g, or c
  misc_feature (31): n equals a,t,g, or c
  misc_feature (273): n equals a,t,g, or c
  misc_feature (279): n equals a,t,g, or c
  misc_feature (283): n equals a,t,g, or c
  misc_feature (297): n equals a,t,g, or c
  misc_feature (301): n equals a,t,g, or c
  misc_feature (303): n equals a,t,g, or c
  misc_feature (310): n equals a,t,g, or c
  misc_feature (312): n equals a,t,g, or c
  misc_feature (342): n equals a,t,g, or c
aatncggcacgaggcaccncctgcgcacccncaatcagtccagcgatgagctgcagctgagtatgggaaatgccatgtttgtcaaagagcaactcagtctgctggacaggttcacggaggatgccaagaggctgtatggctccgaggcctttgccactgactttcaggactcagctgcagctaagaagctcatcaacgactacgtgaagaatggaactcgagggactataacctgaacgacatacttctccagctgaagtacacaggcaatgncagcgnactnttcatcctgcctgntcangncaagatngnggaagtggaagccatgttggttttcagagncc

SEQ ID NO: 623 - DNA, 316 bp, Homo sapiens
  misc_feature (248): n equals a,t,g, or c
  misc_feature (286): n equals a,t,g, or c
  misc_feature (294): n equals a,t,g, or c
  misc_feature (308): n equals a,t,g, or c
  misc_feature (313): n equals a,t,g, or c
gctcaaagggagacccgggtttccagggagcaaaggcgaggctggatttttcggaatacccggtctgaagggtctggctggtgagccaggttttaaaggcagccgaggggaccctgggcccccaggaccacctcctgtcatcctgccaggaatgaaagacattaaaggagagaaaggagatgaagggcctatggggctgaaaggatacctgggcgcaaaaggtatccaaggaatgccaggcatcccanggctgtcaggaatccctgggctgcctgggaggcccggncacatcanaggaatcaaggganacatngga

SEQ ID NO: 624 - DNA, 445 bp, Homo sapiens
  misc_feature (112): n equals a,t,g, or c
  misc_feature (172): n equals a,t,g, or c
  misc_feature (185): n equals a,t,g, or c
  misc_feature (187): n equals a,t,g, or c
  misc_feature (222): n equals a,t,g, or c
  misc_feature (241): n equals a,t,g, or c
  misc_feature (253): n equals a,t,g, or c
  misc_feature (266): n equals a,t,g, or c
  misc_feature (311): n equals a,t,g, or c
  misc_feature (327): n equals a,t,g, or c
  misc_feature (331): n equals a,t,g, or c
  misc_feature (381): n equals a,t,g, or c
  misc_feature (383): n equals a,t,g, or c
  misc_feature (426): n equals a,t,g, or c
  misc_feature (429): n equals a,t,g, or c
  misc_feature (438): n equals a,t,g, or c
ggcagaggtgaggaggtgtggtaccgtgtgctacagatcgtcaccaaccgtgaatgacgtccagggctatgcgccaagaccgtctttaaggcgctccaggcccctgccttgnacgaagaacatggtgaaggttggcggctacatccttggggagtttgggaaacctgaattntggggacccccgntnccagccccccagtggcagttctccctgctccactncaagttccatctgtgacangtggccaggggncgctgctgctgtnccacctgacatcaagttcatcaacctctttccccgagaccaaggncaccatccagggggtnctgnggggtcggttttccagttgcgcaatgttgacgtggagttgcagcaggagncntggagtaacttcaccttcagttcatgggtcagcaacaagttcnggncaggtgttngaggagt

SEQ ID NO: 625 - DNA, 401 bp, Homo sapiens
  misc_feature (30): n equals a,t,g, or c
  misc_feature (33): n equals a,t,g, or c
  misc_feature (380): n equals a,t,g, or c
  misc_feature (389): n equals a,t,g, or c
  misc_feature (390): n equals a,t,g, or c
  misc_feature (393): n equals a,t,g, or c
  misc_feature (397): n equals a,t,g, or c
tcgacccacgcgtccgggcgggtccgccgngantaagacccgctgcccggcacctctagggtgtgatctgaccggtcgcgggggaccagcccagccctatttcggctcgagcgaggaacttctgctcccgtgactgaactctgatcttgatagagagtcccggccatggcagccaaaggaggcaccgtcaaagctgcttcagcattcaatgccactgaagatgcccagaccctgaggaaggccatgaaggggcttggcaccgacgaagatgccatcatcagcgtcctcgcctaccgcaacacagcccagcgccaggaaatcaggacggccttacaagagcaccattcggcaggggaccttgtgttaaggaacggaccccnttttgtttnngantggngtga

SEQ ID NO: 626 - DNA, 315 bp, Homo sapiens
  misc_feature (55): n equals a,t,g, or c
  misc_feature (103): n equals a,t,g, or c
  misc_feature (129): n equals a,t,g, or c
  misc_feature (163): n equals a,t,g, or c
  misc_feature (240): n equals a,t,g, or c
  misc_feature (257): n equals a,t,g, or c
  misc_feature (296): n equals a,t,g, or c
  misc_feature (303): n equals a,t,g, or c
  misc_feature (308): n equals a,t,g, or c
cggtaccggtccctggtgtaccagctgaactttgatcagaccctgaggaatgtanataaggctggcacctgggcccccccgggagctggtgctggtggtccangtgcataaccggcccgaatacctcanactgctgctggactcacttcgaaaagcccagggnaattgacaacgtcctcgtcatctttagccatgacttctggtcgaccgagatcaatcagctgatcgccggggtgaatntctgtccggttctgcangtgttctttcctttcagcattcagttgttccctaacgantttccangttantgaccta

SEQ ID NO: 627 - DNA, 412 bp, Homo sapiens
  misc_feature (211): n equals a,t,g, or c
  misc_feature (282): n equals a,t,g, or c
  misc_feature (319): n equals a,t,g, or c
  misc_feature (320): n equals a,t,g, or c
  misc_feature (327): n equals a,t,g, or c
gaaaaagatgagtatgcctgccgtgtgaaccatgtgactttgtcacagcccaagatagttaagtgggatcgagacatgtaagcagcatcatggaggtttgaagatgccgcatttggattggatgaattccaaattctgcttgcttgctttttaatattgatatgcttatacacttacactttatgcacaaaatgtagggttataataatgntaacatggacatgatcttctttataattctactttgagtgctgtctccatgtttgatgtatctgagcaggntgctccacaggtagctctagcagggctggcaacttannaggtggngagcagagaattctcttatccaacatcaacatcttggtcagatttgaactcttcaatctcttgcactcaaagcttgataaggaaa

SEQ ID NO: 628 - DNA, 577 bp, Homo sapiens
  misc_feature (52): n equals a,t,g, or c
  misc_feature (408): n equals a,t,g, or c
  misc_feature (418): n equals a,t,g, or c
  misc_feature (424): n equals a,t,g, or c
  misc_feature (430): n equals a,t,g, or c
  misc_feature (438): n equals a,t,g, or c
  misc_feature (445): n equals a,t,g, or c
  misc_feature (458): n equals a,t,g, or c
  misc_feature (460): n equals a,t,g, or c
  misc_feature (474): n equals a,t,g, or c
  misc_feature (506): n equals a,t,g, or c
  misc_feature (518): n equals a,t,g, or c
  misc_feature (545): n equals a,t,g, or c
  misc_feature (546): n equals a,t,g, or c
  misc_feature (560): n equals a,t,g, or c
gaaaaaaaaaaaaaaaaaaaaaaaaaaaaaaaaaaaagggcggccgctctanaggatccaagcttacgtacgcgtgcatgcgacgtcatagctcttctatagtgtcacctaaattcaattcactggccgtcgttttacaacgtcgtgactgggaaaaccctggcgttacccaacttaatcgccttgcagcacatccccctttcgccagctggcgtaatagcgaagaggcccgcaccgatcgcccttcccaacagttgcgcagcctgaatggcaaatgggacgcgccctgtagcggcgcattaagcgcggcgggtgtggtggttacgcgcagcgtgaccgctacacttgccagcgccctacgcccggtcctttcgtttcttcccttcctttctcgccacgttcgccggntttccccgtnaagctntaaatngggggctncctttanggttccgattaangntttacgggaccttngacccaaaaacttgattagggtgatggttacntaatgggccatngcctgataaacggttttgccctttgannttggagtcccgttnttaaaagggactttggt

SEQ ID NO: 629 - DNA, 703 bp, Homo sapiens
  misc_feature (146): n equals a,t,g, or c
  misc_feature (344): n equals a,t,g, or c
  misc_feature (391): n equals a,t,g, or c
  misc_feature (414): n equals a,t,g, or c
  misc_feature (428): n equals a,t,g, or c
  misc_feature (438): n equals a,t,g, or c
  misc_feature (457): n equals a,t,g, or c
  misc_feature (494): n equals a,t,g, or c
  misc_feature (499): n equals a,t,g, or c
  misc_feature (518): n equals a,t,g, or c
  misc_feature (541): n equals a,t,g, or c
  misc_feature (576): n equals a,t,g, or c
  misc_feature (580): n equals a,t,g, or c
  misc_feature (586): n equals a,t,g, or c
  misc_feature (603): n equals a,t,g, or c
  misc_feature (621): n equals a,t,g, or c
  misc_feature (632): n equals a,t,g, or c
  misc_feature (643): n equals a,t,g, or c
  misc_feature (651): n equals a,t,g, or c
  misc_feature (668): n equals a,t,g, or c
gactagttctagatcgcgagcggccgctctagaggatccaagcttacgtacgcgtgcatgcgacgtcatagctcttctatagtgtcacctaaattcaattcactggccgtcgttttacaacgtcgtgactgggaaaaccctggcgntacccaacttaatcgccttgcagcacatccccctttcgccagctggcagtaatagcgaagaggcccgcaccgatcgcccttcccaacagttgcgcagcctgaatggcgaatgggacgcgccctgtagcggcgcattaagcgcggcgggtgtggtggttacgcgcagcgtgaccgctacacttgccagcgccctagcgnccgctcctttcgctttcttcccttcctttctcgccacgttcgccggntttccccgtcaagctctaaatcnggggctccctttanggttccgatntagtgctgtacggcacctngaccccaaaaaacttgattagggtgatggttcacgtngtggncatcgccctgatagacggnttttcgccctttgacgttggagnccacgttcttaatagtggactctttggtccaaacnggancaacantgaacccctatctcggnctattcttttgatttatnagggattttgncgatttcaggnctattggntaaaaaatggatcttgnttttaaccaaaaatttaaacggcggaattttaagc

SEQ ID NO: 630 - DNA, 638 bp, Homo sapiens
  misc_feature (14): n equals a,t,g, or c
  misc_feature (70): n equals a,t,g, or c
  misc_feature (72): n equals a,t,g, or c
  misc_feature (75): n equals a,t,g, or c
  misc_feature (105): n equals a,t,g, or c
  misc_feature (120): n equals a,t,g, or c
  misc_feature (153): n equals a,t,g, or c
  misc_feature (213): n equals a,t,g, or c
  misc_feature (222): n equals a,t,g, or c
  misc_feature (245): n equals a,t,g, or c
  misc_feature (256): n equals a,t,g, or c
  misc_feature (305): n equals a,t,g, or c
  misc_feature (307): n equals a,t,g, or c
  misc_feature (315): n equals a,t,g, or c
  misc_feature (319): n equals a,t,g, or c
  misc_feature (327): n equals a,t,g, or c
  misc_feature (329): n equals a,t,g, or c
  misc_feature (342): n equals a,t,g, or c
  misc_feature (351): n equals a,t,g, or c
  misc_feature (354): n equals a,t,g, or c
  misc_feature (357): n equals a,t,g, or c
  misc_feature (376): n equals a,t,g, or c
  misc_feature (416): n equals a,t,g, or c
  misc_feature (449): n equals a,t,g, or c
  misc_feature (484): n equals a,t,g, or c
  misc_feature (500): n equals a,t,g, or c
  misc_feature (502): n equals a,t,g, or c
  misc_feature (526): n equals a,t,g, or c
  misc_feature (532): n equals a,t,g, or c
  misc_feature (537): n equals a,t,g, or c
  misc_feature (570): n equals a,t,g, or c
  misc_feature (574): n equals a,t,g, or c
  misc_feature (593): n equals a,t,g, or c
  misc_feature (613): n equals a,t,g, or c
  misc_feature (629): n equals a,t,g, or c
gaaaaaaaaaaaantaaaaaaaaaaaaaaaaaaaaaaaaaaaaaaaaaaaaaaaaaaaaagggcggccgntntanaggatccaagcttacgtacgcgtgcatgcnacgtcatagctcttntatagggtcacctaaattcaattcactggccgncgttttacaacgtcgtgactgggaaaaccctggcgttacccaacttaatcgccttgcagnacatccccntttcgccagctggcgtaatagcnaaaaggcccgnaccgatcgcccttcccaacagttgcgcagcctgaatggcaaatgggacncnccctgtancggngcattaancncggcgggtgtggnggttacccncancgngaccgctacacttgccagngccctagcgcccgctcctttcgctttcttcccttcctttntcgccacgttcgccggctttccccgtcaagctntaaatcgggggctccctttagggttccgattaagngctttacgggaccttngnccccaaaaaaacttgattaggggngatggntcacngtaaaggggccattgcccttgataaaacggttntttngcccttttgaccttggaantccccgtttctttaaaaaangggaccttttggttcnaactgggaa

SEQ ID NO: 631 - DNA, 187 bp, Homo sapiens
ctaagttctagatcgcgagcggccgctctagaggatccaagcttacgtacgcgtgcatgcgacgtcatagctcttctatagtgtcacctaaattcaattcactggccgtcgttttacaacgtcgtgactgggaaaaccctggcgttacccaacttaatcgccttgcagcacatccccctttcgccag

SEQ ID NO: 632 - DNA, 305 bp, Homo sapiens
  misc_feature (2): n equals a,t,g, or c
  misc_feature (21): n equals a,t,g, or c
  misc_feature (23): n equals a,t,g, or c
cnagaagtcaagcgggccgtngncgatagctggtacgcctgcaggtaccggtccggaattcccgggtcgacccacgcgtccgactagttctagatcgcgagcggccgctctagaggatccaagcttacgtacgcgtgcatgcgacgtcatagctcttctatagtgtcacctaaattcaattcactggccgtcgttttacaacgtcgtgactgggaaaaccctggcgttacccaacttaatcgccttgcagcacatccccctttcgccagctggcgtaatagcgaagaggcccgcaccgatcgccc

SEQ ID NO: 633 - DNA, 187 bp, Homo sapiens
  misc_feature (1): n equals a,t,g, or c
  misc_feature (10): n equals a,t,g, or c
  misc_feature (15): n equals a,t,g, or c
  misc_feature (23): n equals a,t,g, or c
  misc_feature (27): n equals a,t,g, or c
  misc_feature (144): n equals a,t,g, or c
  misc_feature (176): n equals a,t,g, or c
  misc_feature (178): n equals a,t,g, or c
  misc_feature (180): n equals a,t,g, or c
  misc_feature (181): n equals a,t,g, or c
ncttccttangctcnatataccntggntggtaccacccctcactatagggaaagctggtacgcctgcaggtaccggtccggaattcccgggtcgacccacgcgtccgaaaaaaaaaaaaaaaaaaaaaaaaaaaaaaaaagggnggacgatctagaggatccaaagcttacgtacncntnnatgcaa

SEQ ID NO: 634 - DNA, 243 bp, Homo sapiens
  misc_feature (8): n equals a,t,g, or c
  misc_feature (11): n equals a,t,g, or c
  misc_feature (15): n equals a,t,g, or c
  misc_feature (23): n equals a,t,g, or c
  misc_feature (87): n equals a,t,g, or c
  misc_feature (119): n equals a,t,g, or c
  misc_feature (131): n equals a,t,g, or c
  misc_feature (165): n equals a,t,g, or c
  misc_feature (196): n equals a,t,g, or c
  misc_feature (205): n equals a,t,g, or c
  misc_feature (218): n equals a,t,g, or c
  misc_feature (229): n equals a,t,g, or c
aataaggngangagngttaagancggatacgactcactatagggaaagctggtacgcctgcaggtaccggtccggaattcccgggtngacccacgcgtccgtggaaatctgtcctccanaatccaggccanaaagttcacagtcaaatggggaggggtattcttnatgcaggagaccccaggccctggaggctgcnacatacctnaatcctgtcccangccggatcctnctgaagcccttttt

SEQ ID NO: 635 - DNA, 180 bp, Homo sapiens
cccacgcgtccggaatggtttagcgccaggttccccacgaacgtgcggtgcgtgacgggcgagggggcggccgctctagaggatccaagcttacgtacgcgtgcatgcgacgtcatagctcttctatagtgtcacctaaattcaattcactggccgtcgttttacaacgtcgtgactggg

SEQ ID NO: 636 - DNA, 747 bp, Homo sapiens
  misc_feature (3): n equals a,t,g, or c
  misc_feature (4): n equals a,t,g, or c
  misc_feature (6): n equals a,t,g, or c
  misc_feature (497): n equals a,t,g, or c
  misc_feature (507): n equals a,t,g, or c
  misc_feature (639): n equals a,t,g, or c
  misc_feature (657): n equals a,t,g, or c
  misc_feature (747): n equals a,t,g, or c
atnnanagacctccatttggattacgctggtacgcctgcaggtaccggtccggaattcccgggtcgacccacgcgtccgctagttctagatcgcgagcggccgctctagaggatccaagcttacgtacgcgtgcatgcgacgtcatagctcttctatagtgtcacctaaattcaattcactggccgtcgttttacaacgtcgtgactgggaaaaccctggcgttacccaacttaatcgccttgcagcacatccccctttcgccagctggcgtaatagcgaagaggcccgcaccgatcgcccttcccaacagttgcgcagcctgaatggcgaatgggacgcgccctgtagcggcgcattaagcgcggcgggtgtggtggttacgcgcagcgtgaccgctacacttgccagcgccctagcgcccgctcctttcgctttcttcccttcctttctcgccacgttcgccggctttccccgtcaagctctaaatcgggggctncctttagggntccgatttaagtgctttacggacctcgaccccaaaaaacttgattagggtgatgggtcacgtagtgggccatcgcctgatagacggttttcgcctttgacgttggagtcacgtcttaatagggactcttgtncaaactggaacaacactnaacctatttggctatcttttgattataaggatttgccgattcggcattggtaaaaatgagtgttacaaaattacgcgattacaaaaatan

SEQ ID NO: 637 - DNA, 497 bp, Homo sapiens
  misc_feature (375): n equals a,t,g, or c
  misc_feature (415): n equals a,t,g, or c
  misc_feature (445): n equals a,t,g, or c
  misc_feature (446): n equals a,t,g, or c
  misc_feature (463): n equals a,t,g, or c
  misc_feature (497): n equals a,t,g, or c
gtagttctagatcgcgggcggccgctctagaggatccaagcttacgtacgcgtgcatgcgacgtcatagctcttctatagtgtcacctaaattcaattcactggccgtcgttttacaacgtcgtgactgggaaaaccctggcgttacccaacttaatcgccttgcagcacatccccctttcgccagctggcgtaatagcgaagaggcccgcaccgatcgcccttcccaacagttgcgcagcctgaatggcgaatgggacgcgccctgtagcggcgcattaagcgcggcgggtgtggtggttacgcgcagcgtgaccgctacacttgccaagcgccctaagcgcccgttcctttcgctttcttcctttcttttttngccacgttcggccggcttttccccgtaaagctttaaatcnggggggttcccttaaggggttccgattaannggttttacgggaacttngaccccaaaaaaacttgattaggggggaaggttn

SEQ ID NO: 638 - DNA, 509 bp, Homo sapiens
  misc_feature (321): n equals a,t,g, or c
  misc_feature (348): n equals a,t,g, or c
  misc_feature (385): n equals a,t,g, or c
  misc_feature (394): n equals a,t,g, or c
  misc_feature (399): n equals a,t,g, or c
  misc_feature (406): n equals a,t,g, or c
  misc_feature (424): n equals a,t,g, or c
  misc_feature (461): n equals a,t,g, or c
  misc_feature (463): n equals a,t,g, or c
  misc_feature (492): n equals a,t,g, or c
  misc_feature (496): n equals a,t,g, or c
ggactagttctagatcgcgagcggccgctctagaggatccaagcttacgtacgcgtgcatgcgacgtcatagctcttctatagtgtcacctaaattcaattcactggccgtcgttttacaacgtcgtgactgggaaaaccctggcgttacccaacttaatcgccttgcagcacatccccctttcgccagctggcgtaatagcgaagaggcccgcaccgatcgcccttcccaacagttgcgcagcctgaatggcgaatgggacgcgccctgtagcggcgcattaagcgcggcgggtgtggtggttacgcgcagcgtgaccgntacacttgccagcgccctagcgcccgntcctttcgctttcttccttctttctcggcacggtcgnccggctttncccgncaagctntaaatcggggggcttccntttaggggttccgaattaagggctttaccgggaaccntngaacccccaaaaaactttgaattagggtngaangggttcacggtaa

SEQ ID NO: 639 - DNA, 507 bp, Homo sapiens
  misc_feature (2): n equals a,t,g, or c
  misc_feature (214): n equals a,t,g, or c
  misc_feature (263): n equals a,t,g, or c
  misc_feature (298): n equals a,t,g, or c
  misc_feature (334): n equals a,t,g, or c
  misc_feature (355): n equals a,t,g, or c
  misc_feature (356): n equals a,t,g, or c
  misc_feature (360): n equals a,t,g, or c
  misc_feature (363): n equals a,t,g, or c
  misc_feature (373): n equals a,t,g, or c
  misc_feature (375): n equals a,t,g, or c
  misc_feature (384): n equals a,t,g, or c
  misc_feature (407): n equals a,t,g, or c
  misc_feature (430): n equals a,t,g, or c
  misc_feature (453): n equals a,t,g, or c
  misc_feature (481): n equals a,t,g, or c
  misc_feature (485): n equals a,t,g, or c
  misc_feature (489): n equals a,t,g, or c
gnctagttctagatcgcgagcggcccgctctagaggatccaagcttacgtacgcgtgcatgcgacgtcatagctcttctatagtgtcacctaaattcaattcactggccgtcgttttacaacgtcgtgactgggaaaaccctggcgttacccaacttaatcgccttgcagcacatccccctttcgccagctggcataatagcgaagaggcccgnaccgatcgcccttcccaacagttgcgcagcctgaatggcgaatgggacncgccctgtagcggcgcattaagcgcggcgggtgtngtggttacgcgcagcgtgaccgctacacttgcagcnccctagcgcccgctcctttcnntttnttnccttcctttntngcacgtttnacggctttcccgtcaagctctanatcgggggctcctttagggttcnatttaatgtttacggacctttanccaaaaaacttgatatggttatggttantgtnttgngccattgccttatttccc

SEQ ID NO: 640 - DNA, 496 bp, Homo sapiens
  misc_feature (10): n equals a,t,g, or c
  misc_feature (29): n equals a,t,g, or c
  misc_feature (33): n equals a,t,g, or c
  misc_feature (37): n equals a,t,g, or c
  misc_feature (126): n equals a,t,g, or c
  misc_feature (140): n equals a,t,g, or c
  misc_feature (167): n equals a,t,g, or c
  misc_feature (240): n equals a,t,g, or c
  misc_feature (317): n equals a,t,g, or c
  misc_feature (330): n equals a,t,g, or c
  misc_feature (337): n equals a,t,g, or c
  misc_feature (346): n equals a,t,g, or c
  misc_feature (354): n equals a,t,g, or c
  misc_feature (356): n equals a,t,g, or c
  misc_feature (372): n equals a,t,g, or c
  misc_feature (379): n equals a,t,g, or c
  misc_feature (390): n equals a,t,g, or c
  misc_feature (392): n equals a,t,g, or c
  misc_feature (393): n equals a,t,g, or c
  misc_feature (396): n equals a,t,g, or c
  misc_feature (426): n equals a,t,g, or c
  misc_feature (427): n equals a,t,g, or c
  misc_feature (430): n equals a,t,g, or c
  misc_feature (433): n equals a,t,g, or c
  misc_feature (438): n equals a,t,g, or c
  misc_feature (441): n equals a,t,g, or c
  misc_feature (446): n equals a,t,g, or c
  misc_feature (459): n equals a,t,g, or c
  misc_feature (460): n equals a,t,g, or c
  misc_feature (463): n equals a,t,g, or c
  misc_feature (478): n equals a,t,g, or c
aattcggcanagaccaaaatgcagatttncgtnaaancccttacgggggaagaccatcaccctcaaggttaaaccctcggaatacgataggaaaatgtaaaggccaagatccaggataaggaaggnattcctcctgaatncagcagagaactgaatctttgcctggncaagcagctgggaaggatgggacgttactttgtgctgaacttacaatatttcaaaaggggttcttacttcttnatcttgtgttgagaatttcgtgggtggtgcttaggaaaggggaaggaggaagtttttacaaccattcccaggaaggnttaggcccagggnaaagganggtttaagntggttgtncncgaaattttttagggngggttgngattgggcaantnngtnggctttggttggggggttcccctttttaannganttnggggnttnggggngttttttttgggnnggnaaatttttttaaggncttttttttgggggaaaa

SEQ ID NO: 641 - DNA, 186 bp, Homo sapiens
  misc_feature (112): n equals a,t,g, or c
  misc_feature (133): n equals a,t,g, or c
  misc_feature (148): n equals a,t,g, or c
  misc_feature (167): n equals a,t,g, or c
  misc_feature (177): n equals a,t,g, or c
ggcaaacatgcagatctttgtgaagaccctcactggcaaaaccatcacccttgaggtcgagcccagtgacaccattgagaatgtcaaagccaaaattcaagacaaggagggnatcccacctgaccagcagcgnctgatatttgccggnaaacagctggaaggatggncgcaactctntcagactac

SEQ ID NO: 642 - DNA, 519 bp, Homo sapiens
  misc_feature (168): n equals a,t,g, or c
  misc_feature (188): n equals a,t,g, or c
  misc_feature (209): n equals a,t,g, or c
  misc_feature (216): n equals a,t,g, or c
  misc_feature (217): n equals a,t,g, or c
  misc_feature (218): n equals a,t,g, or c
  misc_feature (278): n equals a,t,g, or c
  misc_feature (282): n equals a,t,g, or c
  misc_feature (284): n equals a,t,g, or c
  misc_feature (299): n equals a,t,g, or c
  misc_feature (316): n equals a,t,g, or c
  misc_feature (320): n equals a,t,g, or c
  misc_feature (333): n equals a,t,g, or c
  misc_feature (364): n equals a,t,g, or c
  misc_feature (374): n equals a,t,g, or c
  misc_feature (396): n equals a,t,g, or c
  misc_feature (405): n equals a,t,g, or c
  misc_feature (428): n equals a,t,g, or c
  misc_feature (437): n equals a,t,g, or c
  misc_feature (494): n equals a,t,g, or c
  misc_feature (500): n equals a,t,g, or c
ggcacgaggccctctgaagaggaggcccccaggtctccactggcaccctccgaagggctggctccgatgtatttgatggtgacctgggaatggggcagccaagggctgcaaagcctccccacacatgaccccagccctctacagcggtaaggtgagggacccacattncccctgccctctgagacttngggggacgttgcccccctganatgcagnnngggcctgaatatgtgaaccagccagatgttcggccccagcccccttcgccccgaagatgngctngnctgctgcccgacctncttggtgccactctggnaagnggccaagaatctnttccccagggaagaattgggtcgtcaaaagnggtttttgcnttttgggggttccgttgagaancccgagtangtttacaaccccaagggaagaancttcccctnaagccccaaccttcttccttgcttaagccagcctttgacaacctctaataattggancaaganccaacaaaaccggggggtc

SEQ ID NO: 643 - DNA, 138 bp, Homo sapiens
  misc_feature (11): n equals a,t,g, or c
  misc_feature (36): n equals a,t,g, or c
  misc_feature (72): n equals a,t,g, or c
  misc_feature (74): n equals a,t,g, or c
  misc_feature (92): n equals a,t,g, or c
  misc_feature (102): n equals a,t,g, or c
  misc_feature (103): n equals a,t,g, or c
agttccttgcngcaggcaacccacttaggtggccancaatcttgacttccagatggaagagtgacatctatnanaggaaaagtgatggcatntatatcatanntctcaagaggacctgggagaagcttctgctgggca

SEQ ID NO: 644 - DNA, 602 bp, Homo sapiens
  misc_feature (530): n equals a,t,g, or c
  misc_feature (554): n equals a,t,g, or c
  misc_feature (562): n equals a,t,g, or c
  misc_feature (591): n equals a,t,g, or c
  misc_feature (602): n equals a,t,g, or c
gcccacgcgtccggcgagctgagtggttgtgtggtcgcgtctcggaaaccggtagcgcttgcagcatggctgaccaactgactgaagagcagattgcagaattcaaagaagctttttcactatttgacaaagatggtgatggaactataacaacaaaggaattgggaactgtaatgagatctcttgggcagaatcccacagaagcagagttacaggacatgattaatgaagtagatgctgatggtaatggcacaattgacttccctgaatttctgacaatgatggcaagaaaaatgaaagacacagacagtgaagaagaaattagagaagcattccgtgtgtttgataaggatggcaatggctatattagtgctgcagaacttcgccatgtgatgacaaaccttggaagagaagttaacagatgaagaagtttgatgaaatgatcagggaagcagatattgatggtgatggtcaagtaaactatgaagagtttgtaccaaatgatgacagcaaaagtgaaagaccttttnccagaatggggttaaatttcttgnaccaaaantggttaatttggccttttctttggttggnaacttatctgn

SEQ ID NO: 645 - DNA, 112 bp, Homo sapiens
  misc_feature (3): n equals a,t,g, or c
  misc_feature (24): n equals a,t,g, or c
  misc_feature (41): n equals a,t,g, or c
  misc_feature (48): n equals a,t,g, or c
  misc_feature (59): n equals a,t,g, or c
  misc_feature (106): n equals a,t,g, or c
atntgttgggccggaactgggctngtttcaccggaaagaangtggganctgcctctganaatgtgtatgtccacataccacaccttaggaattctcacgaaaagtnttccaa

SEQ ID NO: 646 - DNA, 514 bp, Homo sapiens
  misc_feature (178): n equals a,t,g, or c
  misc_feature (348): n equals a,t,g, or c
  misc_feature (389): n equals a,t,g, or c
  misc_feature (391): n equals a,t,g, or c
  misc_feature (444): n equals a,t,g, or c
  misc_feature (463): n equals a,t,g, or c
  misc_feature (466): n equals a,t,g, or c
  misc_feature (473): n equals a,t,g, or c
  misc_feature (485): n equals a,t,g, or c
cagcgggccactctggatcctgggcgacgtcttcatcggccgctactacactgtgtttgaccgtgacaacaacagggtgggcttcgccgaggctgcccgcctctagttcccaaggcgtccgcgcgccagcacagaaacagaggagagtcccagagcaggaggcccctggcccagcggnccctcccacacacacccacacactcgcccgcccactgtcctgggcgccctggaagccggcgggccaagccgacttgctgttttgttctgtggtttcccctccctgggttcaaaaatgctgcctgctgtctgtctctccatcttgtttggtgggttaaactgatccaaaanaaaatttgttccgtgattggaaaaaccacccaacttggaancnactctttttcctgggtccttctctccaggatcccccccggcctacaagccgtnggttaacctacccaacagngcncccggcnccttgaactgcngctaagcccttccaattggccattggttc

SEQ ID NO: 647 - DNA, 525 bp, Homo sapiens
  misc_feature (11): n equals a,t,g, or c
  misc_feature (14): n equals a,t,g, or c
  misc_feature (23): n equals a,t,g, or c
  misc_feature (25): n equals a,t,g, or c
  misc_feature (73): n equals a,t,g, or c
  misc_feature (480): n equals a,t,g, or c
  misc_feature (517): n equals a,t,g, or c
ccctactaatntgngcaaaagcncngagctccaccgcggtggcggccgctctagaactagtggatcccccggnttgcaggaattcggcacgagcacgcagcggcccgtggacatcgtcttcctgctggacggctccgagcggctgggtgagcagaacttccacaaggcccggcgcttcgtggagcaggtggcgcggcggctgacgctggcccggagggacgacgaccctctcaacgcacgcgtggcgctgctgcagtttggtggccccggcgagcagcaggtggccttcccgctgagccacaacctcacggccatccacgaggcgctggagaccacgcaatacctgaactccttctcgcacgtgggcgcaggcgtggtgcacgccatcaatgccatcgtgcgcagcccgcgtggcggggcccggaggcacgcagagctgccttcgtggtcctcacggacggcgtcacgggcaacgacagnctgacgagtcggcgcactccatgcgcaagcagaacgnggacccac

SEQ ID NO: 648 - DNA, 317 bp, Homo sapiens
  misc_feature (3): n equals a,t,g, or c
  misc_feature (79): n equals a,t,g, or c
  misc_feature (118): n equals a,t,g, or c
  misc_feature (126): n equals a,t,g, or c
  misc_feature (146): n equals a,t,g, or c
  misc_feature (159): n equals a,t,g, or c
  misc_feature (171): n equals a,t,g, or c
  misc_feature (173): n equals a,t,g, or c
  misc_feature (176): n equals a,t,g, or c
  misc_feature (185): n equals a,t,g, or c
  misc_feature (194): n equals a,t,g, or c
  misc_feature (207): n equals a,t,g, or c
  misc_feature (245): n equals a,t,g, or c
  misc_feature (258): n equals a,t,g, or c
  misc_feature (297): n equals a,t,g, or c
  misc_feature (301): n equals a,t,g, or c
  misc_feature (316): n equals a,t,g, or c
gcncagatgggcatgctgaaggggcctcttcttaacaaatttctgaccacagccaaagataagaaccgctgggaggacnctggtaagcagctctacaacgtggaggccacatcctatnccctcttngccctactgcagctaaaagnctttgactttgtncctcccgtcgtncnttngctcaatgnacagagatnctacggtggtggntatggctctacccaggccaccttcatggtgttccaagncttagctcaatancagaaggacggccctgaccaccaggcactgaaccttgangtgnacctccaaatgctcng

SEQ ID NO: 649 - DNA, 575 bp, Homo sapiens
  misc_feature (501): n equals a,t,g, or c
  misc_feature (509): n equals a,t,g, or c
gtaggaacaccctcatcatctacctggacaaggtctcacactctgaggatgactgtctagctttcaaagttcaccaatactttaatgtagagcttatccagcctggagcagtcaaggtctacgcctattacaacctggaggaaagctgtacccggttctaccatccggaaaaggaggatggaaagctgaacaagctctgccgtgatgaactgtgccgctgtgctgaggagaattgcttcatacaaaagtcggatgacaaggtcaccctggaagaacggctggacaaggcctgtgagccaggagtggactatgtgtacaagacccgactggcaaggttcaagctgtccaatgactttgaccgagtacatcatggccattgagcagaccatcaagtcaggctcggatgaggtgcaggttggacagcagcgcacgttcatcagccccatcaagtgcagagaagccctgaagcttgaggagaagaaacactacttcatgtggggnctcttctnccaattctggggagagaagcccaaccttagctacatcatcgggaaggacacttgggtggagcactg

SEQ ID NO: 650 - DNA, 277 bp, Homo sapiens
  misc_feature (186): n equals a,t,g, or c
  misc_feature (243): n equals a,t,g, or c
  misc_feature (256): n equals a,t,g, or c
  misc_feature (265): n equals a,t,g, or c
  misc_feature (267): n equals a,t,g, or c
  misc_feature (269): n equals a,t,g, or c
  misc_feature (276): n equals a,t,g, or c
tcgacccacgcgtccggcattgtctatcattgcactggagatccaagcacagaagtgtgtagagttaacagaaggaatagaatgtcttcagacacattccaagataaatggcagagatttgaccttctggcaagaacttgtatccaagtgtttaactgaatattcatctaagcaaagtggttccanaccaaatgttccagaagtttgaaaatggatttgttcctggacgtactgcacggcaanctgaagcacaggntactaacgngntnaacccanc

SEQ ID NO: 651 - DNA, 357 bp, Homo sapiens
  misc_feature (9): n equals a,t,g, or c
  misc_feature (13): n equals a,t,g, or c
  misc_feature (86): n equals a,t,g, or c
  misc_feature (89): n equals a,t,g, or c
  misc_feature (97): n equals a,t,g, or c
  misc_feature (100): n equals a,t,g, or c
  misc_feature (106): n equals a,t,g, or c
  misc_feature (175): n equals a,t,g, or c
  misc_feature (185): n equals a,t,g, or c
  misc_feature (221): n equals a,t,g, or c
  misc_feature (289): n equals a,t,g, or c
  misc_feature (299): n equals a,t,g, or c
  misc_feature (321): n equals a,t,g, or c
  misc_feature (324): n equals a,t,g, or c
  misc_feature (355): n equals a,t,g, or c
ggcacaggntccngggtggagctggctgagtcgcgcgctctgctccacccgggggggctgttttttctgggcctggctcgcggcgnacngagatggnagngcagtnggacgaggccgtgaagtaatacaccctaggaggagattcagaagcacaaccacagcaagagcacctggnctgatcctgncaccacaaggtgtacgaatttgaccaaatttctggnagaggcatccctggtgggggaggaagttttaaggggaacaagcttggaggtgacgctacttgaggaanttttgagggntgttcggggcacttttaccagntgncccaagggaaaattgttcccaaaaacatttnca

SEQ ID NO: 652 - DNA, 190 bp, Homo sapiens
  misc_feature (138): n equals a,t,g, or c
  misc_feature (146): n equals a,t,g, or c
  misc_feature (148): n equals a,t,g, or c
  misc_feature (172): n equals a,t,g, or c
  misc_feature (180): n equals a,t,g, or c
ggacgctacttcccctatcatagaagagcttatcacctttcatgatcacgccctcataatcattttccttatctgcttcctagtcctgtatgcccttttcctaacactcacaacaaaactaactaatactaacatctnagacgctnangaaatagaaaccgtctgaactatnctgcccgncatcatccta

SEQ ID NO: 653 - DNA, 603 bp, Homo sapiens
  misc_feature (415): n equals a,t,g, or c
  misc_feature (600): n equals a,t,g, or c
gcttcgaccccgccggaggaggagaccccattctataccaacacctattctgatttttcggtcaccctgaagtttatattcttatcctaccaggcttcggaataatctcccatattgtaacttactactccggaaaaaaagaaccatttggatacataggtatggtctgagctatgatatcaattggcttcctagggtttatcgtgtgagcacaccatatatttacagtaggaatagacgtagacacacgagcatatttcacctccgctaccataatcatcgctatccccaccggcgtcaaagtatttagctgactcgccacactccacggaagcaatatgaaatgatctgctgcagtgctctgagccctaggattcatctttcttttcaccgtaggtggcctgactggcattgnattagcaaactcatcactagacatcgtactacacgacacgtactaccgttgtagcccacttccactatgtcctatcaataggagctggatttgccatcataggaaggcttcattcactgatttccctattctcaggctacaccctagaccaaacctacgccaaaaatcatttcactatcataatncac

SEQ ID NO: 654 - DNA, 356 bp, Homo sapiens
  misc_feature (198): n equals a,t,g, or c
  misc_feature (270): n equals a,t,g, or c
  misc_feature (302): n equals a,t,g, or c
  misc_feature (328): n equals a,t,g, or c
  misc_feature (340): n equals a,t,g, or c
  misc_feature (347): n equals a,t,g, or c
ggtttttttcttcgcaggatttttctgagccttttaccactccagcctagcccctaccccccaattaggagggcactggcccccaacaggcatcaccccgctaaatcccctagaagtcccactcctaaacacatccgtattactcgcatcaggagtatcaatcacctgagctcaccatagtctaatagaaaacaaccnaaaccaaataattcaagcactgcttattacaattttactgggtctctattttaccctcctacaaagcctcanagtacttcgagtctcccttcaccatttccganggcatctacggctcaacattttttgnagcccaggcttncacggantttcacgtc

SEQ ID NO: 655 - DNA, 682 bp, Homo sapiens
  misc_feature (660): n equals a,t,g, or c
gcgcaagtaggtctacaagacgctacttcccctatcatagaagagcttatcacctttcatgatcacgccctcataatcattttccttatctgcttcctagtcctgtatgcccttttcctaacactcacaacaaaactaactaatactaacatctcagacgctcaggaaatagaaaccgtctgaactatcctgcccgccatcatcctagtcctcatcgccctcccatccctacgcatcctttacataacagacgaggtcaacgatccctcccttaccatcaaatcaattggccaccaatggtactgaacctacgagtacaccgactacggcggactaatcttcaactcctacatacttcccccattattcctagaaccaggcgacctgcgactccttgacgttgacaatcgagtagtactcccgattgaagcccccattcgtataataattacatcacaagacgtcttgcactcatgagctgtccccacattaggcttaaaaacagatgcaattcccggacgtctaaaccaaaccactttcaccgctacacgaccgggggtatactacggtcaatgctctgaaatctgtggagcaaaccacagtttcatgcccatcggcctagaattaattcccctaaaaatctttgaaataagggcccgnatttaccctatagcacccctct

SEQ ID NO: 656 - DNA, 520 bp, Homo sapiens
  misc_feature (429): n equals a,t,g, or c
  misc_feature (442): n equals a,t,g, or c
  misc_feature (449): n equals a,t,g, or c
  misc_feature (483): n equals a,t,g, or c
  misc_feature (485): n equals a,t,g, or c
gagaagagcttatcacctttcatgatcacgccctcataatcattttccttatctgcttcctagtcctgtatgcccttttcctaacactcacaacaaaactaactaatactaacatctcagacgctcaggaaatagaaaccgtctgaactatcctgcccgccatcatcctagtcctcatcgccctcccatccctacgcatcctttacataacagacgaggtcaacgatccctcccttaccatcaaatcaattggcaccaatggtactgaacctacgagtacaccgactacggcggactaatcttcaactcctacatacttcccccattattcctagaaccaggcgacctgcgactccttgacggtgacaatcgagtagtactcccgattgaagccccattcgtataataattacatcacaagacgcttgnactcaagagctgncccacantaggcttaaaaacaggatgcaatttccgggcggntnaaacaaaacaattttaccggtacacgaacgggggg

SEQ ID NO: 657 - DNA, 353 bp, Homo sapiens
  misc_feature (227): n equals a,t,g, or c
  misc_feature (340): n equals a,t,g, or c
gcactttctgccaaagaaatctctccttttgcttctagcaccgactagatttccttcagctgatgattgactcccagaattcgaaagaaactgagtcccacaaagctctgtctgatctggagctcgcagcccagtcaataatcttcatttttgctggctatgaaaccaccagcagtgttctttccttcactttatatgaactggccactcaccctgatgtccagcanaaactgcaaaagggagattgatgcagttttgcccaataaggcaccacctacctatgatgccgtggtacagatggattaccttgacatggtggtgaatgaaacctcaaattatncccgttggtatta

SEQ ID NO: 658 - DNA, 362 bp, Homo sapiens
  misc_feature (5): n equals a,t,g, or c
  misc_feature (203): n equals a,t,g, or c
  misc_feature (215): n equals a,t,g, or c
  misc_feature (240): n equals a,t,g, or c
  misc_feature (262): n equals a,t,g, or c
  misc_feature (310): n equals a,t,g, or c
  misc_feature (321): n equals a,t,g, or c
  misc_feature (333): n equals a,t,g, or c
  misc_feature (338): n equals a,t,g, or c
  misc_feature (362): n equals a,t,g, or c
ggcanaggccaccaccatcctgcattgcccactttacttggccttctcctggctctaactcaggcagccaagacccctcccacttccttctttggcctccctctcctcaggtatgaaaatgaagctggccctgcgcccaggcgtttgaaggctgacatcaacggcttgcgccgagtcctgggatgagctgaccctggccaggnctgacctggagntgcagatcgagggcctgaatgaggnagctagccttacctgaagtggnaccacgaaggagggagatggaaggagtttcagcagccagttggccggncaagttcaatnttggagatgggncggancaccgggtgtgggacctgacccgn

SEQ ID NO: 659 - DNA, 447 bp, Homo sapiens
  misc_feature (7): n equals a,t,g, or c
  misc_feature (33): n equals a,t,g, or c
  misc_feature (47): n equals a,t,g, or c
  misc_feature (100): n equals a,t,g, or c
  misc_feature (147): n equals a,t,g, or c
  misc_feature (168): n equals a,t,g, or c
  misc_feature (175): n equals a,t,g, or c
  misc_feature (202): n equals a,t,g, or c
  misc_feature (204): n equals a,t,g, or c
  misc_feature (228): n equals a,t,g, or c
  misc_feature (240): n equals a,t,g, or c
  misc_feature (247): n equals a,t,g, or c
  misc_feature (286): n equals a,t,g, or c
  misc_feature (294): n equals a,t,g, or c
  misc_feature (353): n equals a,t,g, or c
  misc_feature (445): n equals a,t,g, or c
  misc_feature (446): n equals a,t,g, or c
  misc_feature (447): n equals a,t,g, or c
gcttctncgctccttctaggatctccgcctggntcggcccgcctgcntccactcctgcctctaccatgtccatcaaggtgacccagaagtcctacaaggngtccacctctagcccccgggccttcagcagccgctcctacacgaatnggcccggttcccgcatcaacncctcgancttctcccgaataggcagcagcaactntngcagtggcctgggcggcggctatngtggggccagcngcatggnaggcatcaccgcagttacggtcaaccagagcctgctgancccccttntcctggaggtggaccccaacatccaggccgtgcgcacccaggagaaggagcagatcaanaccctcaacaacaagtttgcctcttcatagacaaggtaggttcctggagcagcagaacaagatgttggaaaccaagtagagctccttgagcnnn

SEQ ID NO: 660 - DNA, 295 bp, Homo sapiens
  misc_feature (3): n equals a,t,g, or c
  misc_feature (10): n equals a,t,g, or c
  misc_feature (55): n equals a,t,g, or c
  misc_feature (70): n equals a,t,g, or c
  misc_feature (73): n equals a,t,g, or c
  misc_feature (82): n equals a,t,g, or c
  misc_feature (86): n equals a,t,g, or c
  misc_feature (95): n equals a,t,g, or c
  misc_feature (121): n equals a,t,g, or c
  misc_feature (131): n equals a,t,g, or c
  misc_feature (144): n equals a,t,g, or c
  misc_feature (168): n equals a,t,g, or c
  misc_feature (173): n equals a,t,g, or c
  misc_feature (185): n equals a,t,g, or c
  misc_feature (229): n equals a,t,g, or c
  misc_feature (241): n equals a,t,g, or c
  misc_feature (257): n equals a,t,g, or c
  misc_feature (270): n equals a,t,g, or c
  misc_feature (284): n equals a,t,g, or c
ggnacgagcnaaggcctgcaccattctcctccggggggctagcaaagaaattctntcggaagtagaacgngancctccaggntgcnatgcaagtntgtcgcaatgttctcctgggaccctnagctggtgcnagggggtggggcntccaaaatggctgtggcccatgcnttganagaaaaatccanggccatggactggtgtgggaacaatggccatacagggctgttgnccagggccctanaggttcattcctcgtnaccctggatccanaaactgtggggggncagccaccatt

SEQ ID NO: 661 - DNA, 212 bp, Homo sapiens
  misc_feature (207): n equals a,t,g, or c
  misc_feature (210): n equals a,t,g, or c
gttggcgtgctgggcctggacctctggcaggtcaagtctggcaccatctttgacaacttcctcatcaccaacgatgaggcatacgctgaggagtttggcaacgagacgtggggcgtaacaaaggcagcagagaaacaaatgaaggacaaacaggacgaggagcagaggcttaaggaggaggaagaagacaagaaacgcaaagagganganga

SEQ ID NO: 662 - DNA, 130 bp, Homo sapiens
  misc_feature (13): n equals a,t,g, or c
  misc_feature (20): n equals a,t,g, or c
  misc_feature (35): n equals a,t,g, or c
  misc_feature (48): n equals a,t,g, or c
  misc_feature (74): n equals a,t,g, or c
  misc_feature (123): n equals a,t,g, or c
  misc_feature (129): n equals a,t,g, or c
aaaatacattganatacatnatgaaggccactatnatcctccttctgnttgcacaactttcctgggctggaccntttcatcagacaggcttattagactctatgctagaacatgaagcttatnggatcng

SEQ ID NO: 663 - DNA, 232 bp, Homo sapiens
  misc_feature (2): n equals a,t,g, or c
  misc_feature (8): n equals a,t,g, or c
  misc_feature (9): n equals a,t,g, or c
  misc_feature (10): n equals a,t,g, or c
  misc_feature (21): n equals a,t,g, or c
  misc_feature (138): n equals a,t,g, or c
  misc_feature (139): n equals a,t,g, or c
  misc_feature (195): n equals a,t,g, or c
  misc_feature (205): n equals a,t,g, or c
  misc_feature (216): n equals a,t,g, or c
gnctcatnnngactgttctgncccgattgttgctgctggtgttggtgaatttgaagctggtatctccaagaatgggcagacccgagagcatgcccttctggcttacacactgggtgtgaaacaactaattgtcggtgnnaacaaaatggattccactgagccaccctacagccagaagagatatgaggaaattgntaaggaagtnagcacttaccnttaagaaaaaactggg

SEQ ID NO: 664 - DNA, 296 bp, Homo sapiens
  misc_feature (25): n equals a,t,g, or c
  misc_feature (241): n equals a,t,g, or c
  misc_feature (258): n equals a,t,g, or c
  misc_feature (279): n equals a,t,g, or c
  misc_feature (292): n equals a,t,g, or c
  misc_feature (294): n equals a,t,g, or c
agcggagacccgcaagcgcaagggnctgaaagaaggcatccctgccctggacaacttcctggacaaattgtaggtggcccctgcagcgcctgccgccccggggactcgcagcacccacagcaccacgtcccgaattctcagacgacacctggagactgtcccgacactcccctgagaggtttctggggcccgctgcggtcacgagggggggcccggttacccaattcgtcctatagtgatnatttacaattcactggncgtcgttttacaagtcgtgtntgagttttttttntntt

SEQ ID NO: 665 - DNA, 376 bp, Homo sapiens
  misc_feature (282): n equals a,t,g, or c
  misc_feature (334): n equals a,t,g, or c
  misc_feature (335): n equals a,t,g, or c
  misc_feature (336): n equals a,t,g, or c
  misc_feature (342): n equals a,t,g, or c
gggtcgacccacgcgtccggtttgccgccagaacacaggtgtcgtgaaaactacccctaaaagccaaaatgggaaaggaaaagactcatatcaacattgtcgtcattggacacgtagattcgggcaagtccaccactactggccatctgatctataaatgcggtggcatcgacaaaagaaccattgaaaaatttgagaaggaggctgctgagatgggaaagggctccttcaagtatgcctgggtcttggataaactgaaagctgagcgtgaacgtggtatcnccattggatatctccttgtggaaatttgagaccagcaagtactatgtgactnnncattgnatgcccccaggacacagagactttatccagaaac

SEQ ID NO: 666 - DNA, 332 bp, Homo sapiens
  misc_feature (11): n equals a,t,g, or c
  misc_feature (211): n equals a,t,g, or c
  misc_feature (223): n equals a,t,g, or c
  misc_feature (287): n equals a,t,g, or c
  misc_feature (297): n equals a,t,g, or c
  misc_feature (323): n equals a,t,g, or c
  misc_feature (325): n equals a,t,g, or c
  misc_feature (332): n equals a,t,g, or c
gccggatcctncaatcttcgctcctccaatctccgctcctccacccagttcaggaacccgcgaccgctcgcagcgctctcttgaccactatgagcctcctgtccagccgcgcggcccgtgtccccggtccttcgagctccttgtgcgcgctgttggtgctgctgctgctgctgacgcagccagggcccatcgccagcgctggtcctgccgntgctgtgttganagagctgcgttgccgtttgtttacagaccacgcaaggagtccatcccaaaaatgatcagtaatntgcaagtgtncgccataggcccaacagtgctccaangngggaagn

SEQ ID NO: 667 - DNA, 361 bp, Homo sapiens
  misc_feature (53): n equals a,t,g, or c
  misc_feature (81): n equals a,t,g, or c
  misc_feature (93): n equals a,t,g, or c
  misc_feature (124): n equals a,t,g, or c
  misc_feature (128): n equals a,t,g, or c
  misc_feature (140): n equals a,t,g, or c
  misc_feature (146): n equals a,t,g, or c
  misc_feature (188): n equals a,t,g, or c
  misc_feature (241): n equals a,t,g, or c
  misc_feature (295): n equals a,t,g, or c
  misc_feature (334): n equals a,t,g, or c
  misc_feature (335): n equals a,t,g, or c
  misc_feature (339): n equals a,t,g, or c
  misc_feature (355): n equals a,t,g, or c
gtccttcgtggagctaccgctggccagcattgtctcacttcatgcctccagcngcggtggtaggctgcagacctcacccgnaccgatccagancactcctcccaaggacacttgtagcccgganctgntcatgtccttgnatccanacaaattgtgccgacgacgccatggaccctggtactaaaganagagcttgttgcgcatttggaattgcaccatgcacgggcctgaccttctgggnaccccagctgtgtaggcagaggacagggtgacaattttgtctttgcgcatggcntaatgccatctgtggtcatgacaggttgttcatcaagtnnggantcaggcaatgaaggcngtgggt

SEQ ID NO: 668 - DNA, 518 bp, Homo sapiens
  misc_feature (272): n equals a,t,g, or c
  misc_feature (274): n equals a,t,g, or c
  misc_feature (323): n equals a,t,g, or c
  misc_feature (344): n equals a,t,g, or c
  misc_feature (358): n equals a,t,g, or c
  misc_feature (373): n equals a,t,g, or c
  misc_feature (376): n equals a,t,g, or c
  misc_feature (387): n equals a,t,g, or c
  misc_feature (403): n equals a,t,g, or c
  misc_feature (411): n equals a,t,g, or c
  misc_feature (446): n equals a,t,g, or c
  misc_feature (455): n equals a,t,g, or c
  misc_feature (491): n equals a,t,g, or c
  misc_feature (513): n equals a,t,g, or c
  misc_feature (516): n equals a,t,g, or c
ggcacgagctcctcccagcgcttctacaaggagaacctgggacagggctggatgacccagaagcatgagcggatgaaggtctatgtgcccactggcttctctgccttcccttttgagctattgcacacgcctgaaaagtgggtgaggttcaagtacccaaagctcatctcctattcctacatggttcgtgggggccactttgcggcctttgaggagccggagctgctcgcccaggacatccgcaagttcctgtcggtgctggagcggcatgnanccacccctctccccccgcttgccacttccccccacaatgccctccaggntttcttgggggaagataaccntttctgaggatgantttgcctccgtcccntgnccagttgggancccagttcaacccctnaaccttcnagttaattcccaaccccaatcgtgtggtaagcaangggtttgangataaagatttaatctaaaaaaaaaaaaaaaaatcnggggggggcccgtaacaattgnccnaa

SEQ ID NO: 669 - DNA, 545 bp, Homo sapiens
  misc_feature (8): n equals a,t,g, or c
  misc_feature (11): n equals a,t,g, or c
  misc_feature (13): n equals a,t,g, or c
  misc_feature (58): n equals a,t,g, or c
  misc_feature (337): n equals a,t,g, or c
  misc_feature (453): n equals a,t,g, or c
gcaagatnganantaaccctcactaaagggaacaaaagctggagctccaccgcggtgncggccgctctagaactagtggatcccccgggctgcaggaattcggcacgagagatagaggaggcttccctccaagaggaccccggggttcccgagggaacccctctggaggaggaaacgtccagcaccgagctggagactggcagtgtcccaatccttcaattggtgatttctgctgtgatgtaattgtatgcaggggttgtggaaaccagaacttcgcctggagaacagagtgcaaccagtgtggtgatcgtggcagaggtggccctggtggcatgcngggaggaagaggtggcctcatggatcgtggtggtcccggtggaatgttcagaggtggccgtggtggagacagaggtggcttccgtggtggccggggcatggaccgaggtggctttngtggaggaagacgaggtggccctggggggcccctggacctttgatggaacagatgggaggaagaagaggaggacgtggaggacctgggaaaa

SEQ ID NO: 670 - DNA, 386 bp, Homo sapiens
  misc_feature (141): n equals a,t,g, or c
  misc_feature (173): n equals a,t,g, or c
  misc_feature (192): n equals a,t,g, or c
  misc_feature (208): n equals a,t,g, or c
  misc_feature (285): n equals a,t,g, or c
  misc_feature (320): n equals a,t,g, or c
  misc_feature (352): n equals a,t,g, or c
  misc_feature (379): n equals a,t,g, or c
ggcggactcggtggctagccgatgaggaggccgcggggggaaccggcccccgggccccgagaccgactgagggagcgacctgcgcagggcccggggagtcatgtaagggtggcacccctggctacagtcaacatcttgatntcactgtgccaactgcggtgcctgcccttcanagccctgcactttgttttntcccctggcttcatcnactacatcagtggcacccctcatgctctgattgtgcgtcgctacctctccctgctggacacggccgtggagctgganctcccaagataccggggtccccgccttccccgaangcagtaagtgcccatctttccccaacctctcntcaccgaccgtgcccgctgcaagtacngtcacaa

SEQ ID NO: 671 - DNA, 436 bp, Homo sapiens
  misc_feature (395): n equals a,t,g, or c
tggagacagagcgagggtttgaggagttgcccctgtgcagctgccgcatggaggcacccaagattgacagcatcagcgagagggcggggcacaagtgcatggccactgagagtgtggacggagagctgtcaggctgcaatgccgccatcctcaagcgggagaccatgaggccatccagccgtgtggccctgatggtgctctgtgagacccaccgcgcccgcatggtcaaacaccactgctgcccgggctgcggctacttctgcacggcgggcaccttcctggagtgccaccctgacttccgtgtggcccaccgcttccacaaggcctgtgtgtctcagctgaatgggatggtcttctgtccccactgtggggaggatacttctgaagctcaagangtgaccatccccggggtgacggggtgacccaacggccggca

SEQ ID NO: 672 - DNA, 504 bp, Homo sapiens
  misc_feature (22): n equals a,t,g, or c
  misc_feature (32): n equals a,t,g, or c
  misc_feature (33): n equals a,t,g, or c
  misc_feature (55): n equals a,t,g, or c
  misc_feature (57): n equals a,t,g, or c
  misc_feature (68): n equals a,t,g, or c
  misc_feature (75): n equals a,t,g, or c
  misc_feature (76): n equals a,t,g, or c
  misc_feature (89): n equals a,t,g, or c
  misc_feature (110): n equals a,t,g, or c
  misc_feature (124): n equals a,t,g, or c
  misc_feature (147): n equals a,t,g, or c
  misc_feature (159): n equals a,t,g, or c
  misc_feature (163): n equals a,t,g, or c
  misc_feature (180): n equals a,t,g, or c
  misc_feature (204): n equals a,t,g, or c
  misc_feature (211): n equals a,t,g, or c
  misc_feature (224): n equals a,t,g, or c
  misc_feature (226): n equals a,t,g, or c
  misc_feature (251): n equals a,t,g, or c
  misc_feature (265): n equals a,t,g, or c
  misc_feature (286): n equals a,t,g, or c
  misc_feature (287): n equals a,t,g, or c
  misc_feature (288): n equals a,t,g, or c
  misc_feature (300): n equals a,t,g, or c
  misc_feature (307): n equals a,t,g, or c
  misc_feature (334): n equals a,t,g, or c
  misc_feature (347): n equals a,t,g, or c
  misc_feature (352): n equals a,t,g, or c
  misc_feature (363): n equals a,t,g, or c
  misc_feature (365): n equals a,t,g, or c
  misc_feature (372): n equals a,t,g, or c
  misc_feature (381): n equals a,t,g, or c
  misc_feature (393): n equals a,t,g, or c
  misc_feature (395): n equals a,t,g, or c
  misc_feature (400): n equals a,t,g, or c
  misc_feature (410): n equals a,t,g, or c
  misc_feature (423): n equals a,t,g, or c
  misc_feature (427): n equals a,t,g, or c
  misc_feature (430): n equals a,t,g, or c
  misc_feature (438): n equals a,t,g, or c
  misc_feature (456): n equals a,t,g, or c
  misc_feature (457): n equals a,t,g, or c
  misc_feature (460): n equals a,t,g, or c
  misc_feature (462): n equals a,t,g, or c
  misc_feature (465): n equals a,t,g, or c
  misc_feature (468): n equals a,t,g, or c
  misc_feature (470): n equals a,t,g, or c
  misc_feature (478): n equals a,t,g, or c
  misc_feature (482): n equals a,t,g, or c
  misc_feature (498): n equals a,t,g, or c
  misc_feature (503): n equals a,t,g, or c
aattcggcacgagagcatatcnggtgcatctnngaaagacatcgtgcactctggntnggcatacacantggagcnntctgccaggcaanttatgcgcacagccatgaagnataacctgggtttngacctgagaacagcttcctatgntaatgccattgngaangtcttcaaagtgtacantgaagctggtgtgaccttcacatngatggancatggctgacttncncactatcctcttcacatgtaacttntgcagacctatcanaagtttacatgtaaccacagnnntccctttctctnctgactnattaataatggctaccattcttaacangttaatccaagtncagcncgtttaagggngnaaaggantcaaggttnggcgggttcatntncaagntgcgtgtggnagtagtaattctnctgncancagtgggnccatttttgggtattttnnctntnaantananagggctantttnatcttgttgttgcagnctttnc

SEQ ID NO: 673 - DNA, 431 bp, Homo sapiens
  misc_feature (13): n equals a,t,g, or c
  misc_feature (34): n equals a,t,g, or c
  misc_feature (55): n equals a,t,g, or c
  misc_feature (103): n equals a,t,g, or c
  misc_feature (113): n equals a,t,g, or c
  misc_feature (114): n equals a,t,g, or c
  misc_feature (412): n equals a,t,g, or c
  misc_feature (422): n equals a,t,g, or c
aatacccacaccnaacgggacaaaaacctggaanaccaccgaggtggcggccgcncatagaactagtggaacccccagggctgcaggaattcgggcacgaggnagagcggacnngtgagcagtactgcggcctcctctcctctcctaacctcgctctcgcggcctagctttacccgcccgcctgctcggcgaccagaacaccttccaccatgaccacctcagcaagttcccacttaaataaaggcatcaagcaggtgtacatgtccctgcctcagggtgagaaagtccaggccatgtatatctggatcgatggtactggagaaggactgcgctgcaagacccggaccctggacagtgagcccaagtgtgtggaagagttgcctgagtggaatttcgatggctctagtacttnacagtctganggttccagt

SEQ ID NO: 674 - DNA, 370 bp, Homo sapiens
  misc_feature (22): n equals a,t,g, or c
  misc_feature (23): n equals a,t,g, or c
  misc_feature (29): n equals a,t,g, or c
  misc_feature (33): n equals a,t,g, or c
  misc_feature (81): n equals a,t,g, or c
  misc_feature (114): n equals a,t,g, or c
  misc_feature (238): n equals a,t,g, or c
  misc_feature (260): n equals a,t,g, or c
  misc_feature (267): n equals a,t,g, or c
  misc_feature (282): n equals a,t,g, or c
  misc_feature (309): n equals a,t,g, or c
  misc_feature (310): n equals a,t,g, or c
  misc_feature (360): n equals a,t,g, or c
  misc_feature (369): n equals a,t,g, or c
cgggcgggaaagtcaagatacnngctttnctancttggtggagagagttatccaacaattggaaggtgcttttgcacttgngtttaaaagtgttcattttcccgggcaagcagntggcacaaggcgaggtagccctctgttgattggtgtacggagtgaacataaactttctactgatcacattcctatactctacagaacaggcaaagacaagaaaggaagctgcaatctctctcgngtggacagcacaacctgccttntcccggnggaagaaaaagcagnggagtattactttgcttctgatgcaanngctgcatagaacacaccaatcgcgtcatctttctggaagatgatgatgtngcagcaagna

SEQ ID NO: 675 - DNA, 363 bp, Homo sapiens
  misc_feature (5): n equals a,t,g, or c
  misc_feature (49): n equals a,t,g, or c
  misc_feature (50): n equals a,t,g, or c
  misc_feature (57): n equals a,t,g, or c
  misc_feature (65): n equals a,t,g, or c
  misc_feature (99): n equals a,t,g, or c
  misc_feature (211): n equals a,t,g, or c
  misc_feature (212): n equals a,t,g, or c
  misc_feature (215): n equals a,t,g, or c
  misc_feature (298): n equals a,t,g, or c
  misc_feature (316): n equals a,t,g, or c
  misc_feature (318): n equals a,t,g, or c
  misc_feature (325): n equals a,t,g, or c
  misc_feature (329): n equals a,t,g, or c
ggcanagagaagagagagagagagagagagagactcgtaattcggcagnncccccangtacagtnccttcaagcctacaagccccgagagaatgatganttggcactggagaaagccgacgtggtgatggtgactcaccagagcagtgcacggctggctggagggcgtgaggctctcagacggggagcgaggctggtttcctgtgacagcnntgngagttcatttccaacccagaggtccgtgacacagaacctgaagggaagcttcatcgagtgcaagacttgccaaactacagctngtgggaacagcaagcctnanttttctnctgnagaaggagttttcgtgagctggaagaacaagttg

SEQ ID NO: 676 - DNA, 441 bp, Homo sapiens
  misc_feature (214): n equals a,t,g, or c
  misc_feature (353): n equals a,t,g, or c
  misc_feature (397): n equals a,t,g, or c
  misc_feature (404): n equals a,t,g, or c
  misc_feature (413): n equals a,t,g, or c
  misc_feature (440): n equals a,t,g, or c
  misc_feature (441): n equals a,t,g, or c
ccgaggaccagcgcaacgaggagaaggcgcacgtgaggccaacaaaaagatcgagaagcagctgcagaaggacaagcaggtctaccgggccacgcaccgcctgctgctgctgggtgctggagaatctggtaaaagcaccattgtgaagcagatgaggatcctgcatgttaatgggtttaatggagacagtgagaaggcaaccaaagtgcagganatcaaaaacaacctgaaagaggcgattgaaaccattgtggccgccatgagcaacctggtgccccccgtggagctggccaaccccgaaaaccagttcagagtggactacatcctgagtgtgatgaacgtgcctgactttnacttccctcccgaattctatgagcatgccaaggctctgtgggangatgaangagtgcgtncctgctacgaacgctccaacgaatacnn

SEQ ID NO: 677 - DNA, 550 bp, Homo sapiens
  misc_feature (217): n equals a,t,g, or c
  misc_feature (429): n equals a,t,g, or c
  misc_feature (482): n equals a,t,g, or c
  misc_feature (484): n equals a,t,g, or c
  misc_feature (487): n equals a,t,g, or c
  misc_feature (523): n equals a,t,g, or c
  misc_feature (542): n equals a,t,g, or c
gcgactcgcagcgccaggccaccaaggatgcgggtgtgatcgcggggctcaacgtgctgcggatcatcaacgagcccacggccgccgccatcgcctacggcctggacagaacgggcaagggggagcgcaacgtgctcatctttgacctgggcgggggcaccttcgacgtgtccatcctgacgatcgacgacggcatcttcgaggtgaaggccacggncggggacacccacctgggtggggaggactttgacaacaggctggtgaaccacttcgtggaggagttcaagagaaaacacaagaaggacatcagccagaacaagcgagccgtgaggcggctgcgcaccgctgcgagagggccaagaggaccctgtcgtccagcacccaggccagcctggagatcgacttccttgttttgagggcatcgacttntacacgttcatcaccagggcgaaggttcgaaggagctgtgcttccgaccttgntnccnaaacacccctgggaaccccgtgggaaaaaaggcttnttgcgccgaaaggcccaancttgggac

SEQ ID NO: 678 - DNA, 435 bp, Homo sapiens
  misc_feature (47): n equals a,t,g, or c
  misc_feature (55): n equals a,t,g, or c
  misc_feature (134): n equals a,t,g, or c
  misc_feature (295): n equals a,t,g, or c
  misc_feature (330): n equals a,t,g, or c
  misc_feature (333): n equals a,t,g, or c
  misc_feature (344): n equals a,t,g, or c
  misc_feature (376): n equals a,t,g, or c
  misc_feature (385): n equals a,t,g, or c
  misc_feature (401): n equals a,t,g, or c
  misc_feature (423): n equals a,t,g, or c
  misc_feature (434): n equals a,t,g, or c
  misc_feature (435): n equals a,t,g, or c
tgcaggaagagctcgtggaagaggtggtggccccagtcaaaactggnaaccaggnatatagtaactattggaatcaaggctatggcaactatggatataacagccaaggttacggtggttatggaggatatggnctacactggttacaacaactactatggatatggtgattatagcaaccagcagagtggttatgggaaggtatccaggcgaggtggtcatcaaaatagctacaaaccatacttaaattattccatttgcaacttatccccaacaggtggtgaagcatattttnccatttgaaggttcctttgaggggggctccgcccnggncttaattggcnttccaactaaatttttgggtatccagtccccnatgggagtntgcggtggggcccccnggagtttaattcggggtccccntaaaggatttnn

SEQ ID NO: 679 - DNA, 390 bp, Homo sapiens
  misc_feature (164): n equals a,t,g, or c
  misc_feature (217): n equals a,t,g, or c
  misc_feature (287): n equals a,t,g, or c
  misc_feature (330): n equals a,t,g, or c
  misc_feature (333): n equals a,t,g, or c
  misc_feature (371): n equals a,t,g, or c
  misc_feature (390): n equals a,t,g, or c
cggacgcgtgggctctggcccctggtcctgtcctgttctccaacatggtgtgtctgaagttccctggaagctcctgcatggcagctctgacagtgacactgatggtgctgaactccccactggctttggctggggacacccgaccacgtttcttggagcaggtnaaacatgaatgtcatttcttcaacgggacggaacgggtgcggttcctggacanatacttctatcaccaagaagaatacgtgcgcttcgacagcgacgtgggggaataccgggcggtgacgganctggggcggcctaactccgaatactggaacagccagaaagacnccngggacagaagcgggccgcggtggacacctactgcaganacactacggggttgggtgn

SEQ ID NO: 680 - DNA, 343 bp, Homo sapiens
  misc_feature (2): n equals a,t,g, or c
  misc_feature (3): n equals a,t,g, or c
  misc_feature (8): n equals a,t,g, or c
  misc_feature (11): n equals a,t,g, or c
  misc_feature (18): n equals a,t,g, or c
  misc_feature (121): n equals a,t,g, or c
  misc_feature (122): n equals a,t,g, or c
  misc_feature (132): n equals a,t,g, or c
  misc_feature (158): n equals a,t,g, or c
  misc_feature (160): n equals a,t,g, or c
  misc_feature (175): n equals a,t,g, or c
  misc_feature (197): n equals a,t,g, or c
  misc_feature (202): n equals a,t,g, or c
  misc_feature (223): n equals a,t,g, or c
  misc_feature (240): n equals a,t,g, or c
  misc_feature (272): n equals a,t,g, or c
  misc_feature (278): n equals a,t,g, or c
  misc_feature (280): n equals a,t,g, or c
  misc_feature (292): n equals a,t,g, or c
  misc_feature (331): n equals a,t,g, or c
anngtcanacngacagtnaccgtccggattcccgggtcgacccacgcgtccgtgaggttacagattatgccattgccaggcgcatagtagatttgcattcaagaattgaggaatcaattgnnaatatctatnccctcgatgatatcagaagatatctncnctatgcaagaaagtntaaacccaagaattccaaagantcagnggacttcattgtggagcaatntaaacatctccgcccgnaagatgggttctggagtagcccagtcttcatngagggntncagttgcggccncattgagggccttggatccgtctctcttggaagccaatngctccgggtgcc

SEQ ID NO: 681 - DNA, 523 bp, Homo sapiens
  misc_feature (1): n equals a,t,g, or c
  misc_feature (17): n equals a,t,g, or c
  misc_feature (22): n equals a,t,g, or c
  misc_feature (25): n equals a,t,g, or c
  misc_feature (72): n equals a,t,g, or c
  misc_feature (141): n equals a,t,g, or c
  misc_feature (383): n equals a,t,g, or c
  misc_feature (442): n equals a,t,g, or c
  misc_feature (487): n equals a,t,g, or c
  misc_feature (500): n equals a,t,g, or c
  misc_feature (503): n equals a,t,g, or c
  misc_feature (514): n equals a,t,g, or c
natcttccgtgacactnttganggnacgcccgcaggtacccggtccggaattcccgggtcgacccacgcgtncgcccaattttaccaatctatcaccctatagaagagctaatgttagtataagtaacatgaaaacattcncctccgcataagcctgcgtcagattaaaacactgaactgacaattaacagcccaatatctacaatcaaccaacaagtcattattaccctcactgtcaacccaacacaggcatgctcataaggaaaggttaaaaaaagtaaaaggaactcggcaaatcttaccccgcctgtttaccaaaaacatcacctctagcatcaccagtattagaggcaccgcctgcccagtgacacatgtttaacggncgcggtaccctaaccgtgcaaaggtagcataatcacttggtccttaattagggacctgnatgaatggctccacgagggtcagctggctcttacttttaaccagngaaattgacctgncgngaagaggcggnatgacacag

SEQ ID NO: 682 - DNA, 713 bp, Homo sapiens
  misc_feature (423): n equals a,t,g, or c
  misc_feature (583): n equals a,t,g, or c
  misc_feature (595): n equals a,t,g, or c
  misc_feature (605): n equals a,t,g, or c
  misc_feature (626): n equals a,t,g, or c
  misc_feature (633): n equals a,t,g, or c
  misc_feature (640): n equals a,t,g, or c
  misc_feature (646): n equals a,t,g, or c
  misc_feature (660): n equals a,t,g, or c
ggtcaacccaacacaggcatgctcataaggaaaggttaaaaaaagtaaaaggaactcggcaaatcttaccccgcctgtttaccaaaaacatcacctctagcatcaccagtattagaggcaccgcctgcccagtgacacatgtttaacggccgcggtaccctaaccgtgcaaaggtagcataatcacttgttccttaaatagggacctgtatgaatggctccacgagggttcagctgtctcttacttttaaccagtgaaattgacctgcccgtgaagaggcgggcatgacacagcaagacgagaagaccctatggagctttaatttattaatgcaaacagtacctaacaaacccacaggtcctaaactaccaaacctgcattaaaaatttcggttggggcgacctcggagcagaacccaacctncgagcagtacatgctaagacttcaccagtcaaagcgaactactatactcaattgatccaataacttgaccaacggaacaagttaccctagggataacagcgcaatcctattctagagtccatatcaacaatagggtttacgaacctcgatgtttgatcangacattcccatngtgcagcccnctatttaaaaggttcgttggntcacgantaaaggncctacntgaactgagttcanaaccggagtaaattccaaggcgggtttttatctaccttaaaattcccccctgg

SEQ ID NO: 683 - DNA, 289 bp, Homo sapiens
  misc_feature (6): n equals a,t,g, or c
  misc_feature (15): n equals a,t,g, or c
  misc_feature (28): n equals a,t,g, or c
  misc_feature (73): n equals a,t,g, or c
  misc_feature (80): n equals a,t,g, or c
  misc_feature (225): n equals a,t,g, or c
  misc_feature (237): n equals a,t,g, or c
  misc_feature (240): n equals a,t,g, or c
  misc_feature (252): n equals a,t,g, or c
  misc_feature (287): n equals a,t,g, or c
tccccntactaaagngaacaaaagctgnagctccaccgcggtggcggccgctctagaactagtggatcccccnggctgcntgaattcggcacgagcggcacgaggccctgcggggtgtacaccccccgttgcggctcgggcctgctctgctacccgccccgaggggtggagaagcccctgcacacactgatgcacgggcaaggcgtgtgcatggagctggcgganatcgaggccatncangaaagcctgcanccctctgacaaggacgagggtgaccaccccaacanca

SEQ ID NO: 684 - DNA, 464 bp, Homo sapiens
  misc_feature (4): n equals a,t,g, or c
  misc_feature (353): n equals a,t,g, or c
ggangagcccagccctgggattttcaggtggtttcatttggtgaacaggactgaacagagagaactcaccatggaatttgggctgagctggctttttcttgtggctattttaaaaggtgtccagtgtgaggtgcaattggtggagtctgggggaggcttggtacagcctggggggtccctgagactctcctgtacagtctctggattcacctttcgcaactatgccatgagttgggtccgccagggtccagggaaggggctggaatgggtctcagcaattgacggtagtggttataacacatactacgagaggtccctgcagggccgctttagtgtctccagagacaattccnagaacacactatatctgcaaatgaacagcctgggagccgaggacacggccatctattattgtgcgaagacagaacgtatgggtactggctggtacggacgaaatgactact

SEQ ID NO: 685 - DNA, 545 bp, Homo sapiens
  misc_feature (6): n equals a,t,g, or c
  misc_feature (10): n equals a,t,g, or c
  misc_feature (14): n equals a,t,g, or c
  misc_feature (16): n equals a,t,g, or c
  misc_feature (20): n equals a,t,g, or c
  misc_feature (326): n equals a,t,g, or c
  misc_feature (428): n equals a,t,g, or c
  misc_feature (438): n equals a,t,g, or c
  misc_feature (442): n equals a,t,g, or c
  misc_feature (456): n equals a,t,g, or c
  misc_feature (457): n equals a,t,g, or c
  misc_feature (505): n equals a,t,g, or c
  misc_feature (509): n equals a,t,g, or c
  misc_feature (536): n equals a,t,g, or c
attgantccnttananaccncctttatacgactcactatagggaaagctggtacgcctgcaggtaccggtccggaattcccgggtcgacccacgcgtccggaccgtcacccctggagagacggcctccatctcctgcaggtctagtcagaccctcctgcatgtcaatggacacaactatttggattggtacatgcagaagccagggcagcctccacagctcgtggtctataggggttccaatcgggcctccggggtccctgacaggttcagtggcggtggatcaggcacagattttacacttagaatcaccacggtggaggctgangatgttggcgtttattactgcatgcaagctctacaaagtccgtacacttttggccaggggaccaagctggagatcaaacgaactgtgggctgcaccatctgncttcatcttnccgncatctgatgaacanntgaaatctggaactgcctctggtgggggcctgctgaataacttctatnccanagaggcccaaagtaccagtggaaaggngggataacg

SEQ ID NO: 686 - DNA, 496 bp, Homo sapiens
  misc_feature (358): n equals a,t,g, or c
  misc_feature (417): n equals a,t,g, or c
  misc_feature (460): n equals a,t,g, or c
  misc_feature (472): n equals a,t,g, or c
  misc_feature (481): n equals a,t,g, or c
  misc_feature (488): n equals a,t,g, or c
ctactaaagggaacaaaagctggagctccaccgcggtggcggccgctctagaactagtggatcccccgggctgcaggaattcggcacgagcggctgggcgctgaggatcagccgcttcctgcctggattccacagcttcgcgccgtgtactgtcgccccatccctgcgcgcccagcctgccaagcagcgtgccccggttgcaggcgtcatgcagcgggcgcgacccacgctctgggccgctgcgctgactctgctggtgctgctccgcgggccgccggtggcgcgggctggcgcgagctcggggggcttgggtcccgtggtgcgctgcgaaccgtgcgacgcgcgtgcactggcccantgcgcgccttccgcccgccgtgtgcgccggaacttggtgcgccaagccgggcttgcggntgctgcctgacgtgcgcactgagcgaagggccagccgtgcggnatctacaccgancgctgtggnttccggncttcgttg

SEQ ID NO: 687 - DNA, 476 bp, Homo sapiens
  misc_feature (3): n equals a,t,g, or c
  misc_feature (7): n equals a,t,g, or c
  misc_feature (10): n equals a,t,g, or c
  misc_feature (56): n equals a,t,g, or c
gcncganacnaaccctcactaaagggaacaaaagctggagctccaccgcggtgcgnccgctctagaactagtggatcccccgggctgcaggaattcggcacgagattgatgacaccaatatcacacgactgcagctggagacagagatcgaggctctcaaggaggagctgctcttcatgaagaagaaccacgaagaggaagtaaaaggcctacaagcccagattgccagctctgggttgaccgtggaggtagatgcccccaaatctcaggacctcgccaagatcatggcagacatccgggcccaatatgacgagctggctcggaagaaccgagaggagctagacaagtactggtctcagcagattgaggagagcaccacagtggtcaccacacagtctgctgaggttggagctgctgagacgacgctcacagagctgagacgtacagtccagtccttggagatcgacctgggactt

SEQ ID NO: 688 - DNA, 483 bp, Homo sapiens
  misc_feature (2): n equals a,t,g, or c
  misc_feature (4): n equals a,t,g, or c
anantaaccctcactaaagggaacaaaagctggagctccaccgcggtgcggccgctctagaactagtggatcccccgggctgcaggaattcggcacgagcaggttcccgcccggaagaagcgaccaaagcgcctgaggaccggcaacatggtgcggtcggggaataaggcagctgttgtgctgtgtatggacgtgggctttaccatgagtaactccattcctggtatagaatccccatttgaacaagcaaagaaggtgataaccatgtttgtacagcgacaggtgtttgctgagaacaaggatgagattgctttagtcctgtttggtacagatggcactgacaatcccctttctggtggggatcagtatcagaacatcacagtgcacagacatctgatgctaccagattttgatttgctggaggacattgaaaagcaaaatccaaccaggttctcaacaggctgacttcctgggatgcactaa

SEQ ID NO: 689 - DNA, 339 bp, Homo sapiens
  misc_feature (109): n equals a,t,g, or c
  misc_feature (135): n equals a,t,g, or c
  misc_feature (155): n equals a,t,g, or c
  misc_feature (236): n equals a,t,g, or c
  misc_feature (260): n equals a,t,g, or c
  misc_feature (280): n equals a,t,g, or c
  misc_feature (289): n equals a,t,g, or c
  misc_feature (337): n equals a,t,g, or c
  misc_feature (338): n equals a,t,g, or c
aggcaggaggaagccgatcgaaaactcagagaggaggaagagaagaggaggctaaaggaagagattgaaaggcgaggagcagaagctgctgagaaacgccagaagatgncagaagatggcttgtcagatgacagnaaaccattcaagtgtttcantcctaaaaggttcatctcttcaagatagaagagcgagcagatttttgattaagtctgtgcagaaaagcagtggtgttcaantcgacccttcaagcagcattagtnttccaagtttgacagcagantggagcatnttaccatggcatttgaggggaccaaaagcagccaaaaccttaaaaaanna

SEQ ID NO: 690 - DNA, 594 bp, Homo sapiens
  misc_feature (2): n equals a,t,g, or c
  misc_feature (473): n equals a,t,g, or c
gntgctttctccaccagaagggcacactttcatctaatttggggtatcactgagctgaagacaaagagaagggggagaaaacctagcagaccaccatgtgctatgggaagtgtgcacgatgcatcggacattctctggtggggctcgccctcctgtgcatcgcggctaatattttgctttactttcccaatggggaaacaaagtatgcctccgaaaaccacctcagccgcttcgtgtggttcttttctggcatcgtaggaggtggcctgctgatgctcctgccagcatttgtcttcattgggctggaacaggatgactgctgtggctgctgtggccatgaaaactgtggcaaacgatgtgcgatgctttcttctgtattggctgctctcattggaattgcaggatctggctactgtgtcattgtggcagcccttggcttagcagaaggaccactatgtcttgattccctcggncagtggaactacacctttgccagcaccgagggccaagtaccttctggataccttcacatggtccgagtgcactgaacccaacacattggggaatggaatggatctctggtttctatcctct

SEQ ID NO: 691 - DNA, 538 bp, Homo sapiens
  misc_feature (3): n equals a,t,g, or c
  misc_feature (6): n equals a,t,g, or c
  misc_feature (9): n equals a,t,g, or c
  misc_feature (55): n equals a,t,g, or c
ganganacnaaccctcactaaagggaacaaaagctggagctccaccgcggtgcgnccgctctagaactagtggatcccccgggctgcaggaattcggcacgagcgcatgactttgtcttctccgcacgactgttacagaggtctccagagccttctctctcctgtgcaaaatggcaactcttaaggaaaaactcattgcaccagttgcggaagaagaggcaacagttccaaacaataagatcactgtagtgggtgttggacaagttggtatggcgtgtgctatcagcattctgggaaagtctctggctgatgaacttgctcttgtggatgttttggaagataagcttaaaggagaaatgatggatctgcagcatgggagcttatttcttcagacacctaaaattttggcagataaagattattctgtgaccgccaattctaagattgtagtggtaactgcaggagtccgtcagcaagaaggggagagtcggctcaatctggtgcagagaaatgttaatgtcttcaaattcattattcc

SEQ ID NO: 692 - DNA, 201 bp, Homo sapiens
  misc_feature (125): n equals a,t,g, or c
  misc_feature (143): n equals a,t,g, or c
  misc_feature (161): n equals a,t,g, or c
  misc_feature (165): n equals a,t,g, or c
  misc_feature (183): n equals a,t,g, or c
gctcattgccacgcgcccccgacgaccgcccgacgtgcattcccgattccttttggttccaagtccaatatggcaactctaaaggatcagctgatttataatcttctaaaggaagaacagacccnccagaataagattacagntgttggggttggtgctgntggnatggcctgtgccatcaanatcttaatgaaggacttg

SEQ ID NO: 693 - DNA, 589 bp, Homo sapiens
  misc_feature (1): n equals a,t,g, or c
  misc_feature (2): n equals a,t,g, or c
  misc_feature (23): n equals a,t,g, or c
  misc_feature (271): n equals a,t,g, or c
  misc_feature (312): n equals a,t,g, or c
  misc_feature (342): n equals a,t,g, or c
  misc_feature (354): n equals a,t,g, or c
  misc_feature (377): n equals a,t,g, or c
  misc_feature (401): n equals a,t,g, or c
  misc_feature (424): n equals a,t,g, or c
  misc_feature (437): n equals a,t,g, or c
  misc_feature (466): n equals a,t,g, or c
  misc_feature (491): n equals a,t,g, or c
  misc_feature (551): n equals a,t,g, or c
  misc_feature (571): n equals a,t,g, or c
  misc_feature (572): n equals a,t,g, or c
  misc_feature (576): n equals a,t,g, or c
nncaaaaagtacctaggtgacantatagaaggtacgcctgcaggtaccggtccggaattcccggggttgttaacttgtttattgcagcttataatggttacaaataaagcaatagcatcacaaatttcacaaataaagcatttttttcactgcattctagttgtggtttgtccaaactcatcaatgtatcttatcatgtctggatcgatcctgcattaatgaacggccaacgcgcggggagaggcggtttgcgtattggctggcgtaatancgaaaagcccgcaccgatcgcccttcccaacagttgcgcancctgaatggcgaatgggacgcgccctgtancggcgcattaancgcggcgggtgtggtggttaccncaacgtgaccgctacacttgccancgccctaacgcccgctcctttcnctttcttcccctncctttctcccccacgttccgccgggtttnccccgtcaaactctaaatccggggntcccctttaagggttcccaatttaattgcttaacggcacctccaaccccaaaaaaacttnaataaggggtgaatggttcnnctanttgggccaccccc

SEQ ID NO: 694 - DNA, 386 bp, Homo sapiens
  misc_feature (59): n equals a,t,g, or c
  misc_feature (135): n equals a,t,g, or c
  misc_feature (149): n equals a,t,g, or c
  misc_feature (173): n equals a,t,g, or c
  misc_feature (202): n equals a,t,g, or c
  misc_feature (204): n equals a,t,g, or c
  misc_feature (244): n equals a,t,g, or c
  misc_feature (326): n equals a,t,g, or c
  misc_feature (340): n equals a,t,g, or c
  misc_feature (369): n equals a,t,g, or c
  misc_feature (370): n equals a,t,g, or c
  misc_feature (383): n equals a,t,g, or c
ggcaaagcatggggcagcgagtgtgagaaatgccctctgcctggcacagaggccttcanagagatctgccctgccggccacggctacacctacgcgagctccgacatccgcctgtccatgaggaaagccgaggangaagaactggcaangcccccaagggagcaagggcagangagcagctgggcactgcccgggccaacananaagcagcccctccgggttcgtcacggacacctggcttgangccgggaccatccctgacaaggttgactctcaagctggccaggtcacgaccagtgtcactcatgcacctgcctgggtcacanggaaatgccacaancccacccaatgcctgaacagggaattgcnnaaaattccggaanaaa

SEQ ID NO: 695 - DNA, 475 bp, Homo sapiens
  misc_feature (231): n equals a,t,g, or c
  misc_feature (278): n equals a,t,g, or c
  misc_feature (423): n equals a,t,g, or c
  misc_feature (459): n equals a,t,g, or c
  misc_feature (463): n equals a,t,g, or c
  misc_feature (465): n equals a,t,g, or c
  misc_feature (466): n equals a,t,g, or c
ggttcacagcatatattggtggattcttgtccatagtgcatctgctttaagaattaacgaaagcagtgtcaagacagtaaggattcaaaccatttgccaaaaatgagtctaagtgcatttactctcttcctggcattgattggtggtaccagtggccagtactatgattatgattttcccctatcaatttatgggcaatcatcaccaaactgtgcaccagaatgtaactgncctgaaagctacccaagtgccatgtactgtgatgagctgaaattganaagtgtaccaatggtgcctcctggaatcaagtatctttaccttaggaataaccagattgaccatattgatgaaaaggcctttgagaatgtaactgatctgcagtggctcattctagatcacaaccttctagaaaactccaagatnaaagggagagttttctctaaattgaaacaactgaanaagntnntataaccac

SEQ ID NO: 696 - DNA, 444 bp, Homo sapiens
  misc_feature (402): n equals a,t,g, or c
  misc_feature (410): n equals a,t,g, or c
tatcaagtgtactccaaaatccaggcaacaaacacatggctgtttctaagtagctgtaacggaaatgaaacttctctttgggactgcaagaactggcaatggggtggacttacctgtgatcactatgaagaagccaaaattacctgctcagcccacagggaacccagactggttggaggggacattccctgttctggacgtgttgaagtgaagcatggtgacacgtggggctccatctgtgattcagacttctctctggaagctgccagcgttctatgcagggaattacagtgtggcacagttgtctctatcctggggggagctcactttggagagggaatggacagatctgggctgaagaattccagtgttgagggacatgaatccccatctttcatcttnccagtagnaaccccgcccaaaaggaacttgtagccacagcaa

SEQ ID NO: 697 - DNA, 411 bp, Homo sapiens
  misc_feature (104): n equals a,t,g, or c
  misc_feature (305): n equals a,t,g, or c
  misc_feature (338): n equals a,t,g, or c
  misc_feature (370): n equals a,t,g, or c
  misc_feature (375): n equals a,t,g, or c
  misc_feature (391): n equals a,t,g, or c
  misc_feature (410): n equals a,t,g, or c
aacatggcgggtgtggaggaggtagcggcctccgggagccacctgaatggcgacctggatccagacgacagggaagaaggagctgcctctacggctgaggaaanagccaagaaaaaaagacgaaagaagaagaagagcaaagggccttctgcaggtaaagagagttttatgttttcccagtcccctccgggaacggctgaactgtttggctcaggcccgttgagggggccgggaccggggccccagagccccgactagactgattcttgggcctgacagggtggcaaagccgggctatagatcanggtgcacctgagctttctctgatgtatgcccangcagatctccaggtattcagagcacctgcttncccancctgttagtcttagtnacccaaccctcctgtgcana

SEQ ID NO: 698 - DNA, 135 bp, Homo sapiens
  misc_feature (21): n equals a,t,g, or c
  misc_feature (27): n equals a,t,g, or c
  misc_feature (54): n equals a,t,g, or c
  misc_feature (65): n equals a,t,g, or c
  misc_feature (79): n equals a,t,g, or c
ggcgtgggtttccgggagggnacctgnggggcccagacccagcgcatccggtgnagggtgccctncaactggaagatgnatttcgagccgatttcaagtacaaagttttagaacttggggtgcgtgtgattaggg

SEQ ID NO: 699 - DNA, 434 bp, Homo sapiens
  misc_feature (7): n equals a,t,g, or c
  misc_feature (15): n equals a,t,g, or c
  misc_feature (18): n equals a,t,g, or c
  misc_feature (56): n equals a,t,g, or c
  misc_feature (61): n equals a,t,g, or c
  misc_feature (321): n equals a,t,g, or c
  misc_feature (368): n equals a,t,g, or c
  misc_feature (369): n equals a,t,g, or c
  misc_feature (391): n equals a,t,g, or c
  misc_feature (394): n equals a,t,g, or c
  misc_feature (427): n equals a,t,g, or c
cgtacangagctganggngagcgcgcctgcaggtcgacactagtggatccaaagantgtcngcacagttttctctcttggagcatgcatggaaggcctgaatattttgcttaacagactgttggggatttcattatatgcagagcagcctgcaaaaggagaggtgtggagcgaagatgtccgaaaactggctgttgttcatgaatctgaaggattgttggggtacatttactgtgatttttttcagcgagcagacaaaccacatcaggattgccatttcactatccgtggaggcagactaaaaggaagatgggagactatncaactcccagttgtaagttcttatgctggaatcttccccgttcccgnnagggagttctccaactttggcnaangcctgggcatgatgggaaaacctttcccaggangggggac

SEQ ID NO: 700 - DNA, 435 bp, Homo sapiens
  misc_feature (118): n equals a,t,g, or c
gccgagcgcacgccttgccgccgccccgcagaaatgcttcggttacccacagtctttcgccagatgagaccggtgtccagggtactggctcctcatctcactcgggcttatgccaaanatgtaaaatttggtgcagatgcccgagccttaatgcttcaaggtgtagaccttttagccgatgctgtggccgttacaatggggccaaagggaagaacagtgattattgagcagagttggggaagtcccaaagtaacaaaagatggtgtgactgttgcaaagtcaattgacttaaaagataaatacaagaacattggagctaaacttgttcaagatgttgccaataacacaaatgaagaagctggggatggcactaccactgctactgtactggcacgctctatagccaaggaaggcttcgagaagattagcaaaggt

SEQ ID NO: 701 - DNA, 406 bp, Homo sapiens
aaaatttggtgcagatgcccgagccttaatgcttcaaggtgtagaccttttagccgatgctgtggccgttacaatggggccaaagggaagaacagtgattattgagcagagttggggaagtcccaaagtaacaaaagatggtgtgactgttgcaaagtcaattgacttaaaagataaatacaagaacattggagctaaacttgttcaagatgttgccaataacacaaatgaagaagctggggatggcactaccactgctactgtactggcacgctctatagccaaggaaggcttcgagaagattagcaaaggtgctaatccagtggaaatcaggagaggtgtgatgttagctgttgatgctgtaattgctgaacttaaaaagcagtctaaacctgtgaccacccct

SEQ ID NO: 702 - DNA, 266 bp, Homo sapiens
  misc_feature (203): n equals a,t,g, or c
  misc_feature (215): n equals a,t,g, or c
  misc_feature (230): n equals a,t,g, or c
  misc_feature (239): n equals a,t,g, or c
  misc_feature (252): n equals a,t,g, or c
tgtgagttcaagcgggtgccgcagtgccccagcgggagggtctacgtgctgaagttcaaggcagggtccaagcggcttttcttctggatgcaggaacccaagacagaccaggatgaggagcattgccggaaagtcaacgagttatctggaacaaccccccgatgcctggggcactgggggccagcggaacagcggccacgaantctctgcgctangcggttgaggtggcntgcagagcntgctggggaaacntgagccacagccag

SEQ ID NO: 703 - DNA, 244 bp, Homo sapiens
  misc_feature (194): n equals a,t,g, or c
  misc_feature (207): n equals a,t,g, or c
  misc_feature (208): n equals a,t,g, or c
  misc_feature (211): n equals a,t,g, or c
  misc_feature (216): n equals a,t,g, or c
tacctacgcctaatctactccacctcaatcacactactccccatatctaacaacgtaaaaataaaatgacagtttgaacatacaaaacccaccccattcctccccacactcatcgcccttaccacgctactcctacctatctccccttttatactaataatcttataaaaaaaaaaaaaaaaaaaaaaaaaaangggggggccgggnnccnatttngcccaaagggggggggttttaaaattca

SEQ ID NO: 704 - DNA, 462 bp, Homo sapiens
  misc_feature (7): n equals a,t,g, or c
  misc_feature (45): n equals a,t,g, or c
  misc_feature (102): n equals a,t,g, or c
  misc_feature (162): n equals a,t,g, or c
  misc_feature (168): n equals a,t,g, or c
  misc_feature (183): n equals a,t,g, or c
  misc_feature (186): n equals a,t,g, or c
  misc_feature (189): n equals a,t,g, or c
  misc_feature (206): n equals a,t,g, or c
  misc_feature (215): n equals a,t,g, or c
  misc_feature (224): n equals a,t,g, or c
  misc_feature (259): n equals a,t,g, or c
  misc_feature (270): n equals a,t,g, or c
  misc_feature (294): n equals a,t,g, or c
  misc_feature (314): n equals a,t,g, or c
  misc_feature (321): n equals a,t,g, or c
  misc_feature (323): n equals a,t,g, or c
  misc_feature (336): n equals a,t,g, or c
  misc_feature (339): n equals a,t,g, or c
  misc_feature (344): n equals a,t,g, or c
  misc_feature (347): n equals a,t,g, or c
  misc_feature (356): n equals a,t,g, or c
  misc_feature (358): n equals a,t,g, or c
  misc_feature (381): n equals a,t,g, or c
  misc_feature (401): n equals a,t,g, or c
  misc_feature (406): n equals a,t,g, or c
  misc_feature (427): n equals a,t,g, or c
  misc_feature (443): n equals a,t,g, or c
gtaaganctaagtgaccctcggctgctgcaggggatctgcagcgnactgcagccatgggggcccacctggtccggcgctacctgggcgatgcctcggtggancccgaccccctgcagatgccaaccttcccgccagactacggcttccccgaacgcaaggancgcganatggtggccacacancanganatgatggacgcgcactnaagctccanctgcgggantactgcgcccaccaactcatccgggtgctcaattncaaccttaaancttcccccacttccttggcttgcnaaccaggaacgggacaaatnggaatantnccaaacaccccanaanttttnttncccttaaanantttttaaacggaaacgaagggtntcccccccggaaaaaaaacnggggnaaaaaaaggggaaattttttnccccccccccgcccgnggaaattttcccccccgtt

SEQ ID NO: 705 - DNA, 436 bp, Homo sapiens
gaaggtcagcgccgtaatggcgttcttggcgtcgggaccctacctgacccatcagcaaaaggtgttgcggctttataagcgggcgctacgccacctcgagtcgtggtgcgtccagagagacaaataccgatactttgcttgtttgatgagagcccggtttgaagaacataagaatgaaaaggatatggcgaaggccacccagctgctgaaggaggccgaggaagaattctggtaccgtcagcatccacagccatacatcttccctgactctcctgggggcacctcctatgagagatacgattgctacaaggtcccagaatggtgcttagatgactggcatccttctgagaaggcaatgtatcctgattactttgccaagagagaacagtggaagaaactgcgggagggaaagctgggaacgagaggttaagcagct

SEQ ID NO: 706 - DNA, 487 bp, Homo sapiens
  misc_feature (26): n equals a,t,g, or c
  misc_feature (34): n equals a,t,g, or c
  misc_feature (45): n equals a,t,g, or c
  misc_feature (51): n equals a,t,g, or c
  misc_feature (63): n equals a,t,g, or c
  misc_feature (72): n equals a,t,g, or c
  misc_feature (107): n equals a,t,g, or c
  misc_feature (120): n equals a,t,g, or c
  misc_feature (122): n equals a,t,g, or c
  misc_feature (127): n equals a,t,g, or c
  misc_feature (130): n equals a,t,g, or c
  misc_feature (161): n equals a,t,g, or c
  misc_feature (176): n equals a,t,g, or c
  misc_feature (190): n equals a,t,g, or c
  misc_feature (202): n equals a,t,g, or c
  misc_feature (229): n equals a,t,g, or c
  misc_feature (279): n equals a,t,g, or c
  misc_feature (289): n equals a,t,g, or c
  misc_feature (293): n equals a,t,g, or c
  misc_feature (341): n equals a,t,g, or c
  misc_feature (346): n equals a,t,g, or c
  misc_feature (359): n equals a,t,g, or c
  misc_feature (371): n equals a,t,g, or c
  misc_feature (378): n equals a,t,g, or c
  misc_feature (384): n equals a,t,g, or c
  misc_feature (404): n equals a,t,g, or c
  misc_feature (442): n equals a,t,g, or c
  misc_feature (453): n equals a,t,g, or c
  misc_feature (467): n equals a,t,g, or c
  misc_feature (483): n equals a,t,g, or c
gccagaagaacactgctgctcttggnggacgggnccagaggaatncagagntaaaccttgagngcctgcgtncgtgagaattcagcatggaatgactctactatttnctgggatttctgntnctggntgnaagattgccacttgatgccgccaaacgattncatgatgagctgggnaatgaaagaccttntgcttacatganggagcacaatcaattaaatggctggtnttctgatgaaaatgactggaatgaaaaactctacccagtgtggaagcggngagacatgangtgngaaaaactgctggaagggaggcccgtgtgcaaggcggtcctgaccagngactnaccaacccttggngggctcaaatanaacattngccggngaacctgatattccctaaangccaaaaggaagaagccaatggcaacataggctatganaagaactgganaaatgaagctgggntaaacagctgaaccanaagg

SEQ ID NO: 707 - DNA, 414 bp, Homo sapiens
  misc_feature (178): n equals a,t,g, or c
  misc_feature (214): n equals a,t,g, or c
  misc_feature (219): n equals a,t,g, or c
  misc_feature (365): n equals a,t,g, or c
  misc_feature (368): n equals a,t,g, or c
  misc_feature (382): n equals a,t,g, or c
  misc_feature (402): n equals a,t,g, or c
  misc_feature (408): n equals a,t,g, or c
ggttgttctctggagcagcgttcttttatctccgtccgccttctctcctacctaagtgcgtgccgccacccgatggaagattcgatggacatggacatgagccccctgaggccccagaactatcttttcggttgtgaactaaaggccgacaaagattatcactttaaggtggataatnatgaaaatgagcaccagttatctttaagaacggtcngtttnggggctggtgcaaaggatgagttgcacattgttgaagcagaggcaatgaattacgaaggcagtccaattaaagtaacactggcaactttgaaaatgtctgtacagccaacggttttccccttgggggctttgaataacaccaccanggnccttaaggttgaantgtggttcagggccatgccnattagnggacag

SEQ ID NO: 708 - DNA, 360 bp, Homo sapiens
  misc_feature (287): n equals a,t,g, or c
  misc_feature (335): n equals a,t,g, or c
  misc_feature (343): n equals a,t,g, or c
  misc_feature (352): n equals a,t,g, or c
  misc_feature (355): n equals a,t,g, or c
gaaaagccatctttgcattgttcctcatccgcctccttgctcgccgcagccgcctccgccgcgcgcctcctccgccgccgcggactccggcagctttatcgccagagtccctgaactctcgctttctttttaatcccctgcatcggatcaccggcgtgccccaccatgtcagacgcagccgtagacaccagctccgaaatcaccaccaaggacttaaaggagaagaaggaagttgtggaagaggcagaaatggaagagacgccctgctaacgggatgctaatgaggnaatggggagcaggaggtgacatgaggtagccgagaagaggaagaagtngggagaanagagagaanaanaagtt

SEQ ID NO: 709 - DNA, 253 bp, Homo sapiens
  misc_feature (9): n equals a,t,g, or c
  misc_feature (17): n equals a,t,g, or c
  misc_feature (30): n equals a,t,g, or c
  misc_feature (72): n equals a,t,g, or c
  misc_feature (80): n equals a,t,g, or c
  misc_feature (110): n equals a,t,g, or c
  misc_feature (138): n equals a,t,g, or c
  misc_feature (183): n equals a,t,g, or c
  misc_feature (189): n equals a,t,g, or c
  misc_feature (199): n equals a,t,g, or c
  misc_feature (241): n equals a,t,g, or c
  misc_feature (252): n equals a,t,g, or c
aaagctatntcggtganactatataaggtncgcctgcaggtaccggtccggaattcccgggtcgacccacgngtccgctncggtggtgaacaagtctccagcaccatatntggtttgtctggcccaccatcccggcgnggaccttttccgttagcgtgggtgatattgttcctgctcgaggcncaaatnggtccttggnatctccttccatctgcccattaactctcgcaagtgcctccgngaggaaattcnc

SEQ ID NO: 710 - DNA, 496 bp, Homo sapiens
  misc_feature (11): n equals a,t,g, or c
  misc_feature (14): n equals a,t,g, or c
  misc_feature (220): n equals a,t,g, or c
  misc_feature (289): n equals a,t,g, or c
  misc_feature (304): n equals a,t,g, or c
  misc_feature (312): n equals a,t,g, or c
  misc_feature (342): n equals a,t,g, or c
  misc_feature (344): n equals a,t,g, or c
  misc_feature (357): n equals a,t,g, or c
  misc_feature (371): n equals a,t,g, or c
  misc_feature (376): n equals a,t,g, or c
  misc_feature (386): n equals a,t,g, or c
  misc_feature (404): n equals a,t,g, or c
  misc_feature (407): n equals a,t,g, or c
  misc_feature (412): n equals a,t,g, or c
  misc_feature (413): n equals a,t,g, or c
  misc_feature (420): n equals a,t,g, or c
  misc_feature (460): n equals a,t,g, or c
  misc_feature (463): n equals a,t,g, or c
  misc_feature (469): n equals a,t,g, or c
  misc_feature (476): n equals a,t,g, or c
  misc_feature (483): n equals a,t,g, or c
gaattcggcanagnaagagctcctgacacaacctggagactggacattatttgtgccaaccaatgatgcttttaagggaatgactagtgaagaaaaagaaattctgatacgggacaaaaatgctcttcaaaacatcattctttatcacctacaccaggagttttcattggaaaaggatttgaacctggtgttactaacatttttaaagaccacacaaggnagcaaaatctttctggaaggaagtgaaatggttacacttctggtgaatggatttggaaatccaaaagantctgacatccatggnccaccaanggtggtaatttcatgttgtaggttaaactncncttttccagcagncacaccttttgggnatggntcaactggtngggatacttgattatttnatncaatnncctcccnatttaaggttttttccggggtgggccccttcaagggaatnccngggctnttttttnacacctnaattttttccccc

SEQ ID NO: 711 - DNA, 461 bp, Homo sapiens
  misc_feature (1): n equals a,t,g, or c
  misc_feature (3): n equals a,t,g, or c
  misc_feature (12): n equals a,t,g, or c
  misc_feature (37): n equals a,t,g, or c
  misc_feature (63): n equals a,t,g, or c
  misc_feature (221): n equals a,t,g, or c
  misc_feature (337): n equals a,t,g, or c
  misc_feature (364): n equals a,t,g, or c
ntncaatggaanctccctggagctttcaccgcggtgnccggccgctctagaactagtggattncccgggctgcaggaattcggcacgaggtcgcagacactatgctgcctcccatggccctgcccagtgtatcttggatgctgctttcctgcctcatgctgctgtctcaggttcaaggtgaagaaccccagagggaactgccctctgcacggatccgctgncccaaaggctccaaggcctatggctcccactgctatgccttgtttttgtcaccaaaatcctggacagatgcagatctggcctgccagaagcggccctctggaaacctggtgtctgngctcagtggggctgagggatccttcgngcctccctggtgaagagcattggtaacagctactcatacgtctggattgggctccatgaccccacacagggcaccgagcccaatggataaaggttgg

SEQ ID NO: 712 - DNA, 392 bp, Homo sapiens
  misc_feature (326): n equals a,t,g, or c
  misc_feature (359): n equals a,t,g, or c
  misc_feature (368): n equals a,t,g, or c
  misc_feature (376): n equals a,t,g, or c
  misc_feature (389): n equals a,t,g, or c
cgcaacctttccaagggagtggttgtgtgatcgccatcttagggaaaagatgttctcgtccgtggcgcacctggcgcgggcgaaccccttcaacacgccacatctgcagctggtgcacgatggtctcggggacctccgcagcagctccccagggcccacgggccagccccgccgccctcgcaacctggcagccgccgccgtggaagagcagtatagctgtgactatggatctggcagattctttatcctttgtggacttggaggaattattagctgtggcacaacacatacagcattggttcctctagatctggttaaatgcagangcaggtttgtttttgcatgctggacttagagcnattgaagcntgactgangttaagtattagnata

SEQ ID NO: 713 - DNA, 734 bp, Homo sapiens
  misc_feature (235): n equals a,t,g, or c
  misc_feature (256): n equals a,t,g, or c
  misc_feature (373): n equals a,t,g, or c
  misc_feature (496): n equals a,t,g, or c
  misc_feature (580): n equals a,t,g, or c
  misc_feature (601): n equals a,t,g, or c
  misc_feature (642): n equals a,t,g, or c
  misc_feature (655): n equals a,t,g, or c
  misc_feature (690): n equals a,t,g, or c
  misc_feature (703): n equals a,t,g, or c
gagaaaaaggtggaacggcagacggaacttaagcgcaaatttgaacagatgaaacaagataggatcaccagataccagggtgttaatctttatgtgaaaaatcttgatgatggtattgatgatgaacgtctccggaaagagttttctccatttggtacaatcactagtgcaaaggttatgatggagggtggtcgcagcaaagggtttggttttgtatgtttctcctccccagaanaagccactaaagcagttacanaaatgaacggtagaattgtggccacaaagccattgtatgtagctttagctcagcgcaaagaagagcgccaggctcacctcactaaccagtatatgcagagaatggcaagtgtacganctgttcccaaccctgtaatcaacccctaccagccagcacctccttcaggttacttcatggcagctatcccacagactcagaacgtgctgcatactatcctcctagccaaattgctcaactaanaccaagtcctcgctggactgctcagggtgccataactcatccattccaaaatatgcccggtgctatccgcccagctgctcctanaacaccatttagtactatganaacagcttcttctcagcaacatcttaatgcacagccacaanttacaatgcacancctgctgttcatgttcaaggtcaggaacctttgantgcttccatgttngcatctgcccccccccaaaacaaaaccaatt

SEQ ID NO: 714 - DNA, 500 bp, Homo sapiens
  misc_feature (3): n equals a,t,g, or c
  misc_feature (5): n equals a,t,g, or c
  misc_feature (6): n equals a,t,g, or c
  misc_feature (7): n equals a,t,g, or c
  misc_feature (22): n equals a,t,g, or c
  misc_feature (26): n equals a,t,g, or c
  misc_feature (33): n equals a,t,g, or c
  misc_feature (36): n equals a,t,g, or c
  misc_feature (38): n equals a,t,g, or c
  misc_feature (42): n equals a,t,g, or c
  misc_feature (449): n equals a,t,g, or c
  misc_feature (470): n equals a,t,g, or c
tantnnnttaaccctcactaanggcnacaaagnctngngctncaccgcggtggcggccgctctagcaactagtggatcccccgggcctgtcaggaattcggcacgagctgggacaagcgagtttttaaacaaagtgactgaggcacaggaagatggccagtcaacttctgaattgattggccagtttggtgtcggtttctattccgccttccttgtagcagataaggttattgtcacttcaaaacacaacaacgatacccagcacatctgggagtctgactccaatgaattttctgtaattgctgacccaagaggaaacactctaggacggggaacgacaattacccttgtcttaaaagaagaagcatctgattaccttgaattggatacaattaaaaatctcgtcaaaaaatattcacagttcataaactttcctatttatgtatggngcagcaagactgaaactgttnaggagcccatggaggaagaaggagcagcca

SEQ ID NO: 715 - DNA, 491 bp, Homo sapiens
  misc_feature (2): n equals a,t,g, or c
  misc_feature (4): n equals a,t,g, or c
  misc_feature (58): n equals a,t,g, or c
  misc_feature (62): n equals a,t,g, or c
  misc_feature (65): n equals a,t,g, or c
  misc_feature (116): n equals a,t,g, or c
  misc_feature (248): n equals a,t,g, or c
  misc_feature (250): n equals a,t,g, or c
  misc_feature (271): n equals a,t,g, or c
  misc_feature (278): n equals a,t,g, or c
  misc_feature (285): n equals a,t,g, or c
  misc_feature (293): n equals a,t,g, or c
  misc_feature (310): n equals a,t,g, or c
  misc_feature (314): n equals a,t,g, or c
  misc_feature (319): n equals a,t,g, or c
  misc_feature (321): n equals a,t,g, or c
  misc_feature (326): n equals a,t,g, or c
  misc_feature (339): n equals a,t,g, or c
  misc_feature (353): n equals a,t,g, or c
  misc_feature (360): n equals a,t,g, or c
  misc_feature (398): n equals a,t,g, or c
  misc_feature (410): n equals a,t,g, or c
  misc_feature (422): n equals a,t,g, or c
  misc_feature (473): n equals a,t,g, or c
  misc_feature (474): n equals a,t,g, or c
gnanaaatgtggtggaggctcagtttgatagccgggttcgtgcaacaggacacagttntganaantacaacaagtgggaaacgatagaggcttggactcaacaagtcgccactganaatccagccctcatctctcgcagtgttatcggaaccacatttgagggacgcgctatttacctcctgaaggttggcaaagctggacaaaataagcctgccattttcatggactgtgggtttcccatgccagananttggatttctccctgcattcngccagtnggttttntaaaaaangcggttcccttcctatngacntttanancccanttgacaaacttcnccaacaatttaaanttttatnttcccgccctgtggccccaatattgaagggcaacttcnaccccgggaacnaaaacccaattntggaaaaaaaaaccccccccccccctggtgggattcttgctttggttgggnnccaccccaaaaaaattt

SEQ ID NO: 716 - DNA, 331 bp, Homo sapiens
  misc_feature (242): n equals a,t,g, or c
  misc_feature (303): n equals a,t,g, or c
  misc_feature (321): n equals a,t,g, or c
  misc_feature (322): n equals a,t,g, or c
  misc_feature (326): n equals a,t,g, or c
gtaaagccggggcagcagccggcggtccgggtgtaagcggcgtgtgcgtgtgcaagagccgctacccggtgtgcggcagcgacggcaccacctacccgagcggctgccagctgcgcgccgccagccagagggccgagagccgcggggagaaggccatcacccaggtcagcaagggcacctgcgagcaaggtccttccatagtgacgccccccaaggacatctggaatgtcactggtgcccangtgtacttgagctgtgaggtcatcggaatcccgacacctgtcctcatctggaacaaggtanaaaggggtcactatgganntcanaggac

SEQ ID NO: 717 - DNA, 486 bp, Homo sapiens
  misc_feature (5): n equals a,t,g, or c
  misc_feature (25): n equals a,t,g, or c
  misc_feature (32): n equals a,t,g, or c
  misc_feature (38): n equals a,t,g, or c
  misc_feature (42): n equals a,t,g, or c
  misc_feature (68): n equals a,t,g, or c
  misc_feature (78): n equals a,t,g, or c
  misc_feature (99): n equals a,t,g, or c
  misc_feature (107): n equals a,t,g, or c
tatcnttactaagggtacaaagttngggtctnccaccnggtngaggaccgctcctagcaactagtggntcccccgggnctgcaggaattcggcacgagnatattagncagcggttattcggtgagcggtggtggtttattcttccgtggagttaagggctccgtggacatctcaggtcttcagggtcttccatctggaactatataaagttcagaaaacatgtctcgagatatgactccaggaccactatattttctccagaaggtcgcttataccaagttgaatatgccatggaagctattggacatgcaggcacctgtttgggaattttagcaaatgatggtgttttgcttgcagcagagagacgcaacatccacaagcttcttgatgaagtctttttttctgaaaaaatttataaactcaatgaggacatggcttgcagtgtggcaggcataactttctgatgctaatgttctgactaatgac

SEQ ID NO: 718 - DNA, 479 bp, Homo sapiens
  misc_feature (436): n equals a,t,g, or c
tcgacccacgcgtccgcagcccacccatccacgttgactcatcctcagagacgaatcgacaccctcaactcagatggatacacccctgagccagacaaaccgcggccgatgcccatggacacgagcgtgtatgagagcccctacagcgacccagaggagctcaaggacaagaagctcttcctgaagcgcgataacctcctcatagctgacattgaacttggctgcggcaactttggctcagtgcgccagggcgtgtaccgcatgcgcaagaagcagatcgacgtggccatcaaggtgctgaagcagggcacggagaaggcagacacggaagagatgatgcgcgaggcgcagatcatgcaccagctggacaacccctacatcgtgcggctcattggcgtctgccaggccgaagccctcatgctggtcatggagatgntgggggcgggcgctgcacaagttcctggtcggcaagaaggaag

SEQ ID NO: 719 - DNA, 572 bp, Homo sapiens
  misc_feature (418): n equals a,t,g, or c
  misc_feature (421): n equals a,t,g, or c
  misc_feature (501): n equals a,t,g, or c
  misc_feature (503): n equals a,t,g, or c
  misc_feature (526): n equals a,t,g, or c
  misc_feature (546): n equals a,t,g, or c
  misc_feature (559): n equals a,t,g, or c
gcgtgcccatgagaatgagatcaccaaagtgcgaaaagttactttcaatggactgaaccagatgattgtcatagaactgggcaccaatccgctgaagagctcaggaattgaaaatggggctttccagggaatgaagaagctctcctacatccgcattgctgataccaatatcaccagcattcctcaaggtcttcctccttcccttacggaattacatcttgatggcaacaaaatcagcagagttgatgcagctagcctgaaaggactgaataatttggctaagttgggattgagtttcaacagcatctctgctgttgacaatggctctctggccaacacgcctcatctgagggagcttcacttggacaacaacaagcttaccagagtacctggtgggctgcagagcataaagtacatncanggtggctaccttcataacaaccatatctctgtagttggatcaaagtgacttctggccacctggacacaaccacccaaaangnttcttaattccgggtgggaagcnttttaacaaacccgggccangactggggagaanacagccatccacc

SEQ ID NO: 720 - DNA, 487 bp, Homo sapiens
  misc_feature (3): n equals a,t,g, or c
  misc_feature (376): n equals a,t,g, or c
  misc_feature (447): n equals a,t,g, or c
  misc_feature (459): n equals a,t,g, or c
  misc_feature (460): n equals a,t,g, or c
  misc_feature (467): n equals a,t,g, or c
  misc_feature (468): n equals a,t,g, or c
ggntaaatcagaactcgaatggccttgttttcttgctctggggctcttatgctcagaagaagggcagtgccattgataggaagcggcaccatgtactacagacggctcatccctcccctttgtcagtgtatagagggttctttggatgtagacacttttcaaagaccaatgagctgctgcagaagtctggcaagaagcccattgactggaaggagctgtgatcatcagctgaggggtggcctttgagaagctgctgttaacgtatttgccagttacgaagttccactgaaaattttcctattaattcttaagtactctgcataagggggaaaagcttccagaaagcagccatgaaccaggctgtccaggaatggancctgtatccaaccacaaacaacaaaggctaccctttgacccaaatgtctttctctgcaacatggcttcggnctaaaatatgcnnaagacannatgagggccaatacttaat

SEQ ID NO: 721 - DNA, 464 bp, Homo sapiens
  misc_feature (222): n equals a,t,g, or c
  misc_feature (312): n equals a,t,g, or c
  misc_feature (347): n equals a,t,g, or c
  misc_feature (349): n equals a,t,g, or c
  misc_feature (364): n equals a,t,g, or c
  misc_feature (415): n equals a,t,g, or c
  misc_feature (436): n equals a,t,g, or c
  misc_feature (443): n equals a,t,g, or c
  misc_feature (448): n equals a,t,g, or c
  misc_feature (455): n equals a,t,g, or c
cggacgcgtgggcgtctgctggggcacctgaaggagacttgggggcacccgcgtcgtgcctcctgggttgtgaggagtcgccgctgccgccactgcctgtgcttcatgaggaagatgctcgccgccgtctcccgcgtgctgtctggcgcttctcagaagccggcaagcagagtgctggtagcatcccgtaattttgcaaatgatgctacatttgaaattaanaaatgtgaccttcaccggctggaagaagccctcctgtcacaacagtgctcaccaagggaagatgggctcaaatactacaggatgatgcanactgtacccgaatggaattgaaacagatcactgtntnaacagaaaattatcntggtttctgtccttgtgtgatgtcagaacttgctgtgtggcctggagccgnatcaccccaaacactctccanctacggntccgnttatttnccgggcttc

SEQ ID NO: 722 - DNA, 320 bp, Homo sapiens
  misc_feature (12): n equals a,t,g, or c
  misc_feature (43): n equals a,t,g, or c
  misc_feature (113): n equals a,t,g, or c
  misc_feature (142): n equals a,t,g, or c
  misc_feature (152): n equals a,t,g, or c
  misc_feature (153): n equals a,t,g, or c
  misc_feature (182): n equals a,t,g, or c
  misc_feature (211): n equals a,t,g, or c
  misc_feature (263): n equals a,t,g, or c
  misc_feature (275): n equals a,t,g, or c
  misc_feature (281): n equals a,t,g, or c
  misc_feature (299): n equals a,t,g, or c
  misc_feature (308): n equals a,t,g, or c
gttgcacagcanctgcacgcgccgtggctccggatctcttcgnctttgcagcgtagcccgagtcggtcagcgccggatgacctcagcagccatgtcgaagccccatagtgaanccgggactgccttcattcagacccagcanctgcacgcanncatggctgacacattcctggagcacatgngccgcctggacattgattcaccacccatnacaggccggaacactggcatcatctgtaccattggcccagcttcccgatcangtggagacggtnaagganatgattaaagcctggaangaatgtggntcgtctgaactt

SEQ ID NO: 723 - DNA, 152 bp, Homo sapiens
  misc_feature (79): n equals a,t,g, or c
  misc_feature (87): n equals a,t,g, or c
  misc_feature (111): n equals a,t,g, or c
  misc_feature (127): n equals a,t,g, or c
  misc_feature (148): n equals a,t,g, or c
gcccaccatggctgcaatccgaaagaagctggtgatcgttggggatggtgcctgtgggaagacctgcctcctcatcgtnttcagcanggatcagtttccggaggtctacgnccctactgtcctttgngaactatattgcgcacattgnggcg

SEQ ID NO: 724 - DNA, 573 bp, Homo sapiens
  misc_feature (463): n equals a,t,g, or c
  misc_feature (514): n equals a,t,g, or c
  misc_feature (553): n equals a,t,g, or c
  misc_feature (559): n equals a,t,g, or c
  misc_feature (569): n equals a,t,g, or c
gctgctatgttcaatataagaaatattggaaagacgctcgtcaccaggacccaaggaaccaaaattgcatctgatggtctcaagggtcgtgtgtttgaagtgagtcttgctgatttgcagaatgatgaagttgcatttagaaaattcaagctgattactgaagatgttcagggtaaaaactgcctgactaacttccatggcatggatcttacccgtgacaaaatgtgttccatggtcaaaaaatggcagacaatgattgaagctcacgttgatgtcaagactaccgatggttacttgcttcgtctgttctgtgttggttttactaaaaaacgcaacaatcagatacggaagacctcttatgctcagcaccaacaggtccgccaaatccggaagaagatgatggaaatcatgacccgagaggtgcagacaaatgacttgaaagaagtggtcaataaattgattncagacgcattggaaaagacatagaaaaggcttggcaatctattatcctctncatgatggcttcgttagaaaagtaaaaatgctgaagaanccaagnttgaatgggnaaac

SEQ ID NO: 725 - DNA, 403 bp, Homo sapiens
  misc_feature (9): n equals a,t,g, or c
gcttgaaantaaccctcactaaagggaacaaaagctggagctccaccgcggtgcggccgctctagaactagtggatcccccgggctgcaggaattcggcacgagtcctggtccgcgccagagcccagcgcgcctcgtcgccatgcctcggaaaattgaggaaatcaaggacttcctgctcacagcccgacgaaaggatgccaaatctgtcaagatcaagaaaaataaggacaacgtgaagtttaaagttcgatgcagcagatacctttacaccctggtcatcactgacaaagagaaggcagagaaactgaagcagtccctgccccccggtttggcagtgaaggaactgaaatgaaccagacacactgattggaactgtattatattaaaatactaaaaatcct

SEQ ID NO: 726 - DNA, 502 bp, Homo sapiens
  misc_feature (7): n equals a,t,g, or c
  misc_feature (8): n equals a,t,g, or c
  misc_feature (12): n equals a,t,g, or c
  misc_feature (256): n equals a,t,g, or c
  misc_feature (281): n equals a,t,g, or c
  misc_feature (380): n equals a,t,g, or c
  misc_feature (391): n equals a,t,g, or c
  misc_feature (428): n equals a,t,g, or c
  misc_feature (456): n equals a,t,g, or c
cgcaagnncganactaaccctcactaaagggaacaaaagctggagctccaccgcggtgcggccgctctagaactagtggatcccccgggctgcaggaattcggcacgagagccatcaggtaagccaagatgggtgcatacaagtacatccaggagctatggagaaagaagcagtctgatgtcatgcgctttcttctgagggtccgctgctggcagtaccgccagctctctgctctccacagggctccccgccccanccggcctgataaagcgcgccgactnggctacaaggccaagcaaggttacgttatatataggattcgtgttcgacgtggtggccgaaaacgcccagttcctaagggtgcaattacggcaagcctntccatcatggngttaaccagctaaagtttgctcgaagccttcagtccnttgcagaggagcgagctggacgccactntggggctctgagagtcctgaattcttactgggttggtgaagattcc

SEQ ID NO: 727 - DNA, 361 bp, Homo sapiens
  misc_feature (17): n equals a,t,g, or c
  misc_feature (309): n equals a,t,g, or c
  misc_feature (318): n equals a,t,g, or c
  misc_feature (360): n equals a,t,g, or c
ggcacgagcgaacgcgnagagcacgccatgaaggcctcgggcacgctacgagagtacaaggtagtgggtcgctgcctgcccacccccaaatgccacacgccgcccctctaccgcatgcgaatctttgcgcctaatcatgtcgtcgccaagtcccgcttctggtactttgtatctcagttaaagaagatgaagaagtcttcaggggagattgtctactgtgggcaggtgtttgagaagtcccccctgcgggtgaagaacttcgggatctggctgcgctatgactcccggagcggcacccacaacatgtancgggaatancgggacctgaccaacgcaggcgctgtcaaccagtgtaacggng

SEQ ID NO: 728 - DNA, 401 bp, Homo sapiens
  misc_feature (6): n equals a,t,g, or c
  misc_feature (200): n equals a,t,g, or c
  misc_feature (234): n equals a,t,g, or c
  misc_feature (251): n equals a,t,g, or c
  misc_feature (319): n equals a,t,g, or c
  misc_feature (332): n equals a,t,g, or c
  misc_feature (334): n equals a,t,g, or c
  misc_feature (360): n equals a,t,g, or c
  misc_feature (389): n equals a,t,g, or c
gaagangctcgcctctagtgtcctccgctgtggcaagaagaagtctggttagaccccaatgagaccaatgaaatcgccaatgccaactcccgtcagcagatccggaagctcatcaaagatgggctgatcatccgcaagcctgtgacggtccattcccgggctcgatgccggaaaaacaccttggcccgccggaaaggcangcacatgggcatagttagcggaaaggtacagccnatgcccgaatgccaaanaaggtcacatggattaagaaaatgaagattttgcgcccgctgctcaaaaaatacgtgaatcttaaaanatcgatcgccacntntttcacagcctgttcctaaagttaanggaattttttcaaaaacaaccgattctcntggaacacttcc

SEQ ID NO: 729 - DNA, 530 bp, Homo sapiens
  misc_feature (7): n equals a,t,g, or c
  misc_feature (10): n equals a,t,g, or c
  misc_feature (12): n equals a,t,g, or c
  misc_feature (14): n equals a,t,g, or c
  misc_feature (60): n equals a,t,g, or c
  misc_feature (527): n equals a,t,g, or c
gcacagnganancnaaccctcactaaagggaacaaaagctggagctccaccgcggtgcgnccgctctagaactagtggatcccccgggctgcaggaattcggcacgagccgccatcttccagtaattcgccaaaatgacgaacacaaagggaaagaggagaggcacccgatatatgttctctaggccttttagaaaacatggagttgttcctttggccacatatatgcgaatctataagaaaggtgatattgtagacatcaagggaatgggtactgttcaaaaaggaatgccccacaagtgttaccatggcaaaactggaagagtctacaatgttacccagcatgctgttggcattgttgtaaacaaacaagttaagggcaagattcttgccaagagaattaatgtgcgtattgagcacattaagcactctaagagccgagatagcttcctgaaacgtgtgaaggaaaatgatcagaaaaagaaagaagccaaagagaaaggtacctgggttcaactaaagcgccancct

SEQ ID NO: 730 - DNA, 375 bp, Homo sapiens
  misc_feature (33): n equals a,t,g, or c
  misc_feature (55): n equals a,t,g, or c
  misc_feature (87): n equals a,t,g, or c
  misc_feature (97): n equals a,t,g, or c
  misc_feature (111): n equals a,t,g, or c
  misc_feature (121): n equals a,t,g, or c
  misc_feature (124): n equals a,t,g, or c
  misc_feature (125): n equals a,t,g, or c
  misc_feature (142): n equals a,t,g, or c
  misc_feature (181): n equals a,t,g, or c
  misc_feature (183): n equals a,t,g, or c
  misc_feature (190): n equals a,t,g, or c
  misc_feature (198): n equals a,t,g, or c
  misc_feature (206): n equals a,t,g, or c
  misc_feature (229): n equals a,t,g, or c
  misc_feature (241): n equals a,t,g, or c
  misc_feature (248): n equals a,t,g, or c
  misc_feature (262): n equals a,t,g, or c
  misc_feature (269): n equals a,t,g, or c
  misc_feature (284): n equals a,t,g, or c
  misc_feature (322): n equals a,t,g, or c
  misc_feature (333): n equals a,t,g, or c
  misc_feature (354): n equals a,t,g, or c
  misc_feature (367): n equals a,t,g, or c
gggtggttgctgccgaaatgggcaagttcatgnaaccaagaaagtggtgcttgtnctggctggacgctactccggacgcaaagctgntcatcgtaanagaacattgaatgntggcacctcnaanngcccctacagccatgcnctggtggctgggaattgaaccgctacccccgcaaatgancngctgccntggggcangaagaagntcgccaggaggtcaaagatatantcttttgtgaangtgtgtnactacaatcacctnatgcccncaaggtactctgtgngatattccccttggggcaaagctgtacgttcattaggntgtcttccganattcctggctcttaaacgctnggcccgaaggagncccaggtc

SEQ ID NO: 731 - DNA, 207 bp, Homo sapiens
  misc_feature (143): n equals a,t,g, or c
  misc_feature (177): n equals a,t,g, or c
  misc_feature (187): n equals a,t,g, or c
  misc_feature (201): n equals a,t,g, or c
  misc_feature (207): n equals a,t,g, or c
gcgccgctgcgaagggagccgccgccatgtctgcgcatctgcaatggatggtcgtgcggaactgctccagtttcctgatcaagaggaataagcagacctacagcactgagcccaataacttgaaggcccgcaattccttccgntacaacggactgattcaccgcaagactgtgggcntggagccggnagccgacggcaaangtgtcn

SEQ ID NO: 732 - DNA, 702 bp, Homo sapiens
  misc_feature (10): n equals a,t,g, or c
  misc_feature (620): n equals a,t,g, or c
  misc_feature (628): n equals a,t,g, or c
  misc_feature (655): n equals a,t,g, or c
  misc_feature (686): n equals a,t,g, or c
  misc_feature (690): n equals a,t,g, or c
ggcagaatgnctcccgcaaagaagggtggcgagaagaaaaagggccgttctgccatcaacgaagtggtaacccgagaatacaccatcaacattcacaagcgcatccatggagtgggcttcaagaagcgtgcacctcgggcactcaaagagattcggaaatttgccatgaaggagatgggaactccagatgtgcgcattgacaccaggctcaacaaagctgtctgggccaaaggaataaggaatgtgccataccgaatccgtgtgcggctgtccagaaaacgtaatgaggatgaagattcaccaaataagctatatactttggttacctatgtacctgttaccactttcaaaaatctacagacagtcaatgtggatgagaactaatcgctgatcgtcagatcaaataaagttataaaattgcaaaaaaaaaaaaaaagggcggccgctctagaggatccaagcttacgtacgcgtgcatgcgacgtcatagctcttctatagtgtcacctaaattcaattcactgccgtcggtttacaacgtcgtgactgggaaaaccctgcgttacccaacttaatcgccttgcagcacatcccctttcgccagctgcgtaataacgaanaggcccgnaccgatcgcctttccacagttgcgcancctgaatggcgaatggacgcgcctttaccgngcantaagcgccgcgg

SEQ ID NO: 733 - DNA, 441 bp, Homo sapiens
  misc_feature (1): n equals a,t,g, or c
  misc_feature (22): n equals a,t,g, or c
  misc_feature (62): n equals a,t,g, or c
  misc_feature (99): n equals a,t,g, or c
  misc_feature (101): n equals a,t,g, or c
  misc_feature (118): n equals a,t,g, or c
  misc_feature (126): n equals a,t,g, or c
  misc_feature (152): n equals a,t,g, or c
  misc_feature (185): n equals a,t,g, or c
  misc_feature (212): n equals a,t,g, or c
  misc_feature (260): n equals a,t,g, or c
  misc_feature (310): n equals a,t,g, or c
  misc_feature (356): n equals a,t,g, or c
naattaaccctcactaaagggngcaaaagctggtgctccaccgcggtgcgaccgctctaganctagtggttcccccgggctgcaggatttcggcacgancncgtgcagattcgagcanaggagcgnaagggaacgtcatcgtttggaaagcntcgcaataagacgcacacgttgtgccgccgctntggctctaaggcctaccaccttcagangtcgacctgtggcaaatttggctaccctgccaagcgcaagagaaagtntaactggagtgccaaggctaaaagacgaaataccaccggaactggtcgantgaggcacctaaaatttgtataccgcagattcaggcatggtttccntgaaggaacaacacctaaacccaagagggcagctgttgcagcatccagttcatcttaagattgtcaacgattagtcatgcaataa

SEQ ID NO: 734 - DNA, 379 bp, Homo sapiens
  misc_feature (42): n equals a,t,g, or c
  misc_feature (323): n equals a,t,g, or c
  misc_feature (324): n equals a,t,g, or c
  misc_feature (342): n equals a,t,g, or c
  misc_feature (346): n equals a,t,g, or c
  misc_feature (375): n equals a,t,g, or c
ggccgcagaagcgagatgacgaagggaacgtcatcgtttggnaagcgtcgcaataagacgcacacgttgtgccgccgctgtggctctaaggcctaccaccttcagaagtcgacctgtggcaaatgtggctaccctgccaagcgcaagagaaagtataactggagtgccaaggctaaaagacgaaataccaccggaactggtcgaatgaggcacctaaaaattgtataccgcagattcaggcatggattccgtgaaggaacaacacctaaacccaagagggcagctgttgcagcattccagttcatctttaagaatgtcaacgnntttagtcatgcaataaantgtnctggggttttaaaaaattaaaagaaaagnaaaa

SEQ ID NO: 735 - DNA, 187 bp, Homo sapiens
  misc_feature (172): n equals a,t,g, or c
  misc_feature (176): n equals a,t,g, or c
  misc_feature (177): n equals a,t,g, or c
  misc_feature (179): n equals a,t,g, or c
  misc_feature (185): n equals a,t,g, or c
gcgggatcgtcggtaaatacgggacccgctatggggcctccctccggaaaatggtgaagaaaattgaaatcagccagcacgccaagtacacttgctctttctgtggcaaaaccaagatgaagagacgagctgtggggatctggcactgtggttcctgcatgaagacagtggntggnngngcctgnac

SEQ ID NO: 736 - DNA, 576 bp, Homo sapiens
  misc_feature (94): n equals a,t,g, or c
  misc_feature (334): n equals a,t,g, or c
  misc_feature (340): n equals a,t,g, or c
  misc_feature (361): n equals a,t,g, or c
  misc_feature (371): n equals a,t,g, or c
  misc_feature (397): n equals a,t,g, or c
  misc_feature (409): n equals a,t,g, or c
  misc_feature (429): n equals a,t,g, or c
  misc_feature (436): n equals a,t,g, or c
  misc_feature (440): n equals a,t,g, or c
  misc_feature (444): n equals a,t,g, or c
  misc_feature (452): n equals a,t,g, or c
  misc_feature (466): n equals a,t,g, or c
  misc_feature (479): n equals a,t,g, or c
  misc_feature (490): n equals a,t,g, or c
  misc_feature (519): n equals a,t,g, or c
  misc_feature (553): n equals a,t,g, or c
tcgacccacgcgtccgcccacgctccggcctcagccctaccagcactggtcatgtctaaaggtcatcgtattgaggaagttcctgaacttcttntggtagttgaagataaagttgaaggctacaagaagaccaaggaagctgttttgctccttaagaaacttaaagcctgggaatgatatcaaaaaggtctatgcctctcagcgaatgagagctgggcaaaggcaaaatggagaaaccgtcgccgtatccagcgcagggcccgtgcatcatctataatgaggataatggtatcatcaaggccttccagaaacatccctggaattactctgcttnaatgtnaagcaagctgaaacattttgnaagcttgctncctggtggggcatgtggggacgtttncggcattggganggaaatggcttttccgggantttaganggantgtnacgggcantgggcgtaaagcgntttccctccaagngttaactacantcttcccaggcaccaagatggattaatanagatcttggcagaatctggaaaagcccagaggtnccaagggcccttcgggcaccagc

SEQ ID NO: 737 - DNA, 297 bp, Homo sapiens
  misc_feature (7): n equals a,t,g, or c
  misc_feature (243): n equals a,t,g, or c
  misc_feature (254): n equals a,t,g, or c
  misc_feature (261): n equals a,t,g, or c
  misc_feature (266): n equals a,t,g, or c
  misc_feature (275): n equals a,t,g, or c
gctccgncatggcgtgtgctcgcccactgatatcggtgtactccgaaaagggggagtcatctggcaaaaatgtcactttgcctgctgtattcaaggctcctattcgaccagatattgtgaactttgttcacaccaacttgcgcaaaaacaacagacagccctatgctgtcagtgaattagcaggtcatcagactagtgctgagtcttggggtactggcagagctgtggctcgaattcccaganttcgaggtggngggactnaccgntctggccanggtgcttttggaaacatgtgtc

SEQ ID NO: 738 - DNA, 354 bp, Homo sapiens
  misc_feature (26): n equals a,t,g, or c
  misc_feature (74): n equals a,t,g, or c
  misc_feature (80): n equals a,t,g, or c
  misc_feature (84): n equals a,t,g, or c
  misc_feature (98): n equals a,t,g, or c
  misc_feature (120): n equals a,t,g, or c
  misc_feature (148): n equals a,t,g, or c
  misc_feature (193): n equals a,t,g, or c
  misc_feature (286): n equals a,t,g, or c
  misc_feature (303): n equals a,t,g, or c
  misc_feature (329): n equals a,t,g, or c
  misc_feature (351): n equals a,t,g, or c
  misc_feature (353): n equals a,t,g, or c
gcgagaatgaagactattctcagcantcagactgtcgacattccagaaaatgtcgacattactctgaagggacncacagntatngtgaagggccccanaggaaccctgcggagggacttnaatcacatcaatgtataactcagccttnttggaaagaaaaaaaagaggctccgggttgacaaatggtggggtnacagaaaggaactggctaccgttcggactatttgtagtcatgtacagaacatgatcaagggtgttacactgggcttccgttacaagatgaggnctgtgtatgctcacttncccatcaacgttgttatccaagagantgggtctattgttgaaatccanant

SEQ ID NO: 739 - DNA, 504 bp, Homo sapiens
ccgccatcatgggtcgcatgcatgctcccgggaagggcctgtcccagtcggctttaccctatcgacgcagcgtccccacttggttgaagttgacatctgacgacgtgaaggagcagatttacaaactggccaagaagggccttactccttcacagatcggtgtaatcctgagagattcacatggtgttgcacaagtacgttttgtgacaggcaataaaattttaagaattcttaagtctaagggacttgctcctgatcttcctgaagatctctaccatttaattaagaaagcagttgctgttcgaaagcatcttgagaggaacagaaaggataaggatgctaaattccgtctgattctaatagagagccggattcaccgtttggctcgatattataagaccaagcgagtcctccctcccaattggaaatatgaatcatctacagcctctgccctggtcgcataaatttgtctgtgtactcaagcaataaaatgattgtttaact

SEQ ID NO: 740 - DNA, 399 bp, Homo sapiens
ggacccgccaacatgggccgcgttcgcaccaaaaccgtgaagaaggcggcccgggtcatcatagaaaagtactacacgcgcctgggcaacgacttccacacgaacaagcgcgtgtgcgaggagatcgccattatccccagcaaaaagctccgcaacaagatagcaggttacgtcacgcatctgatgaagcgaattcagagaggcccagtaagaggtatctccatcaagctgcaggaggaggagagagaaaggagagacaattatgttcctgaggtctcagccttggatcaggagattattgaagtagatcctgacactaaggaaatgctgaagcttttggacttcggcagtctgtccaaccttcagtcactcagcctacagttgggatgatttcaaaac

SEQ ID NO: 741 - DNA, 431 bp, Homo sapiens
  misc_feature (335): n equals a,t,g, or c
  misc_feature (393): n equals a,t,g, or c
  misc_feature (417): n equals a,t,g, or c
  misc_feature (425): n equals a,t,g, or c
aaacaacggtcgtgccaaaaagggccgcggccatgtgcagcccattcgctgcacgaactgcgcccggtgcgtgcccaaggataaggccatcaagaagtttgtcattcggaacattgtagaagccgctgctgtcagggacatatctgaagcaagcgtcttcgacgcctacgtgcttcccaagctctatgtcaagctgcattattgcgtgactgtgccatccatagcaaggttgttaggaatcgatcccgctaagcccggaaggaccgaacacccccaccacgattcagacctgctggcgctgcaccttcgacctccaccaaagcccatgtaaagangccgtttttgtaaggacggaaggaaaattaccttggaaaaataaaatggaagttgtanttttaaaaaaaaaaaaaaaacccnaggggggncccgtc

SEQ ID NO: 742 - DNA, 357 bp, Homo sapiens
  misc_feature (178): n equals a,t,g, or c
  misc_feature (240): n equals a,t,g, or c
  misc_feature (273): n equals a,t,g, or c
  misc_feature (297): n equals a,t,g, or c
  misc_feature (324): n equals a,t,g, or c
  misc_feature (352): n equals a,t,g, or c
  misc_feature (353): n equals a,t,g, or c
gtgcagcggttcattaaaatcgatggcaaggtccgaactgatataacctaccctgctggattcatggatgtcatcagcattgacaagacgggagagaatttccgtctgatctatgacaccaagggtcgctttgctgtacatcgtattacacctgaggaggccaagtacaagttgtgcnaagtgagaaagatctttgtgggcacaaaaggaatccctcatctggtgactcatgatgcccgnaccatccgctaccccgatcccctcatcaaggtnaatgatccattcatattgatttanagactggcaagattactgatttcatcnatttcgacactggtaacctgtgtatggnnactg

SEQ ID NO: 743 - DNA, 249 bp, Homo sapiens
  misc_feature (42): n equals a,t,g, or c
  misc_feature (77): n equals a,t,g, or c
  misc_feature (115): n equals a,t,g, or c
  misc_feature (122): n equals a,t,g, or c
  misc_feature (158): n equals a,t,g, or c
  misc_feature (200): n equals a,t,g, or c
  misc_feature (215): n equals a,t,g, or c
  misc_feature (221): n equals a,t,g, or c
  misc_feature (248): n equals a,t,g, or c
ggggcggtatgccgccaaacgcttccgcaaagctcagtgtcncattgtggagcgcctcactaactccatgatgatgnacgggcgcaacaacggcaagaagctcatgactgtgcgnatcgtcnagcatgccttcgagatcatacgcctgctcacaggcnaagaaccctctgcaggtcctggtgaacgccatcatcaacatnggtccccgggaagantccacncgcattgggcgcgccgggactgttgana

SEQ ID NO: 744 - DNA, 383 bp, Homo sapiens
gaagaattgcatcgtgctcatcgacagcacaccgtaccgacagtggtacgagtcccactatgcgctgcccctgggccgcaagaagggagccaagctgactcctgaggaagaagagattttaaacaaaaaacgatctaaaaaaattcagaagaaatatgatgaaaggaaaaagaatgccaaaatcagcagtctcctggaggagcagttccagcagggcaagcttcttgcgtgcatcgcttcaaggccgggacagtgtggccgagcagatggctatgtgctagagggcaaagagttggagttctatcttaggaaaatcaaggcccgcaaaggcaaataaatccttgttttgtcttcacccatgtaataaaggtgtttattggttt

SEQ ID NO: 745 - DNA, 452 bp, Homo sapiens
  misc_feature (314): n equals a,t,g, or c
  misc_feature (328): n equals a,t,g, or c
  misc_feature (334): n equals a,t,g, or c
  misc_feature (352): n equals a,t,g, or c
  misc_feature (403): n equals a,t,g, or c
  misc_feature (416): n equals a,t,g, or c
  misc_feature (429): n equals a,t,g, or c
  misc_feature (435): n equals a,t,g, or c
  misc_feature (451): n equals a,t,g, or c
gcgcacgatgcctggagttactgtaaaagacgtgaaccagcaggagttcgtcagagctctggcagccttcctcaaaaagtccgggaagctgaaagtccccgaatgggtggataccgtcaagctggccaagcacaaagagcttgctccctacgatgagaactggttctacacgcgagctgcttccacagcgcggcacctgtacctccggggtggcgctggggttggctccatgaccaagatctatgggggacgtcagagaaacggcgtcatgcccagccacttcagccgaggctccaagagtgtggcccgccggntcctccaagccctnggaggngctgaaaatggtggaaanggaccaagatggcggcccgcaaactgacacctcagggacaaagagatctgnacagaatcgccgnacaggtggcagcntgccancaaagaagcattaganc

SEQ ID NO: 746 - DNA, 114 bp, Homo sapiens
  misc_feature (11): n equals a,t,g, or c
  misc_feature (22): n equals a,t,g, or c
  misc_feature (55): n equals a,t,g, or c
  misc_feature (85): n equals a,t,g, or c
  misc_feature (98): n equals a,t,g, or c
  misc_feature (103): n equals a,t,g, or c
tgcatgctggngctggtcctgnccttgctgtcctccagctctgctgaggagtacntgggcctgtctgcaaaccaatgtgccgtgncagccaaggacanggtgnactgtggctac

SEQ ID NO: 747 - DNA, 165 bp, Homo sapiens
ggcacagccacccagggcctgagtcctgtccacaccccaggtgacggccggctccacaaggcagtgagcgtgggcccccgggtgcacatcattgaggagctgcagatcttctcatcgggacagcccgtggcagaatctgctcctgggacacccacaggggggctg

SEQ ID NO: 748 - DNA, 583 bp, Homo sapiens
  misc_feature (46): n equals a,t,g, or c
  misc_feature (291): n equals a,t,g, or c
  misc_feature (341): n equals a,t,g, or c
  misc_feature (387): n equals a,t,g, or c
  misc_feature (458): n equals a,t,g, or c
  misc_feature (462): n equals a,t,g, or c
  misc_feature (480): n equals a,t,g, or c
  misc_feature (537): n equals a,t,g, or c
  misc_feature (541): n equals a,t,g, or c
  misc_feature (543): n equals a,t,g, or c
  misc_feature (546): n equals a,t,g, or c
  misc_feature (580): n equals a,t,g, or c
ggctagaagatggttttggagagcaccccttttaccactgcctggntgcagaagtgccgaaagagcactggactccggaaggacacagcattgttggttttgccatgtactattttacctatgacccgtggattggcaagttattgtatcttgaggacttcttcgtgatgagtgattatagaggctttggcataggatcagaaattctgaagaatctaagccaggttgcaatgaggtgtcgctgcagcagcatgcacttttttggtagcagaatggaatgaaccattcatnaacttctataaaagaagaggtgcttctgatctgtccagtgaagaaggttngagacttgttaagaatcgacaaggagtcttgctaaaaatggcaacntaggagtgaggaatgcttgctgtagatgacaacctccattctattttagaataaaattccccaactttctnttgnttttctatgctggttggnagtgaaattaatttaaatgagcacccatttcaaaagctttaattaccaagtgggcgnttgntnccntgttttgaaaattgaaggtcttgttttaaaaggnggc

SEQ ID NO: 749 - DNA, 419 bp, Homo sapiens
  misc_feature (3): n equals a,t,g, or c
  misc_feature (16): n equals a,t,g, or c
  misc_feature (24): n equals a,t,g, or c
  misc_feature (29): n equals a,t,g, or c
  misc_feature (30): n equals a,t,g, or c
  misc_feature (169): n equals a,t,g, or c
  misc_feature (342): n equals a,t,g, or c
  misc_feature (351): n equals a,t,g, or c
  misc_feature (376): n equals a,t,g, or c
  misc_feature (398): n equals a,t,g, or c
  misc_feature (419): n equals a,t,g, or c
acncggaggcttcttnattacggncgggnntgatgagggaaagctggtgacgcctgcaggtgaccggtccggaattcccgggtcgacccacgcgtccgggcgtgatgtctcacagaaagttctccgctcccagacatgggtccctcggcttcctgcctcggaagcgcanagcaggcatcgtgggaaggtgaagagcttccctaaggatgacccgtccaagccggtccacctcacagccttcctgggatacaaggctggcatgactcacatcgtgcgggaagtcgacaggccgggatccaaggtgaacaagaaggagggtggtggaggctgtgaccattgtanagacaccanccatggtggtttgtgggcattgttngctacgttggaaaaccctcganggctccggaacttcaagaatn

SEQ ID NO: 750 - DNA, 507 bp, Homo sapiens
  misc_feature (453): n equals a,t,g, or c
  misc_feature (475): n equals a,t,g, or c
  misc_feature (497): n equals a,t,g, or c
  misc_feature (499): n equals a,t,g, or c
  misc_feature (503): n equals a,t,g, or c
ggccgaacatggagatcaagattatatctggcactgcattgatctcttcttagatttcattactgtcttcagaaaactcatgatgatcctggccatgaatgaaaaggataagaagaaagagaagaaatgaagtgaccatccagcctttcccaattagacttcctctccttccacccctcatttcctttttgcacacattacaggtggtgtgttctgtgataatgaaaagcatcagaaaagcttttgtactttgtggtttcctctattttgaattttttgatcaaaaaactgattagcagaatatagtttggagtttggcttcatcttcctggggttcccctcactcccttttttggcaaccccatctgtagcctcttcctctactcaggcagtcgacccgccacgatgagaagtgggaccagcagagggcgccaacttcaggagcccgctttnccacccagcttcattcacccantggacctgaactgtttgggtanancccnccgg

SEQ ID NO: 751 - DNA, 435 bp, Homo sapiens
  misc_feature (1): n equals a,t,g, or c
  misc_feature (11): n equals a,t,g, or c
  misc_feature (23): n equals a,t,g, or c
  misc_feature (31): n equals a,t,g, or c
  misc_feature (34): n equals a,t,g, or c
  misc_feature (110): n equals a,t,g, or c
  misc_feature (134): n equals a,t,g, or c
  misc_feature (151): n equals a,t,g, or c
  misc_feature (158): n equals a,t,g, or c
  misc_feature (199): n equals a,t,g, or c
  misc_feature (215): n equals a,t,g, or c
  misc_feature (218): n equals a,t,g, or c
  misc_feature (226): n equals a,t,g, or c
  misc_feature (239): n equals a,t,g, or c
  misc_feature (243): n equals a,t,g, or c
  misc_feature (257): n equals a,t,g, or c
  misc_feature (295): n equals a,t,g, or c
  misc_feature (321): n equals a,t,g, or c
  misc_feature (324): n equals a,t,g, or c
  misc_feature (331): n equals a,t,g, or c
  misc_feature (355): n equals a,t,g, or c
  misc_feature (363): n equals a,t,g, or c
  misc_feature (365): n equals a,t,g, or c
  misc_feature (403): n equals a,t,g, or c
  misc_feature (420): n equals a,t,g, or c
nactggaagtnctccgggagaanggatctcnacngcggtgccggacgctctagaactagtggatcccccgggctgcaggtagcctgagcttagctcagcgccggggcttnaccaagacctacactgttggctgngaggaatgcacagtggntccctgnttatccatcccctgcaaactgcagagtggcactcattgctngtggacggaccagctnctncaaggctntgaaaagggcttncagncccgtcaccttgcntgcctgcctcgggagccagggctgggcacctggcagtncctgcggtcccagatagcctgaatantgnccggagnggaagctgaagcctgcacagtgtncaccctgntnccactcccatctttctttcggacaatgaaataaagagntaccacccagcaaaaanaaaaaaaaaaacctg

SEQ ID NO: 752 - DNA, 591 bp, Homo sapiens
  misc_feature (195): n equals a,t,g, or c
  misc_feature (240): n equals a,t,g, or c
  misc_feature (319): n equals a,t,g, or c
  misc_feature (345): n equals a,t,g, or c
  misc_feature (365): n equals a,t,g, or c
  misc_feature (407): n equals a,t,g, or c
  misc_feature (452): n equals a,t,g, or c
  misc_feature (456): n equals a,t,g, or c
  misc_feature (480): n equals a,t,g, or c
  misc_feature (556): n equals a,t,g, or c
  misc_feature (570): n equals a,t,g, or c
  misc_feature (572): n equals a,t,g, or c
  misc_feature (579): n equals a,t,g, or c
  misc_feature (586): n equals a,t,g, or c
gcggcacgaggcgcccagagagacaccagagaacccaccatggccccctttgagcccctggcttctggcatcctgttgttgctgtggctgatagcccccagcagggcctgcacctgtgtcccaccccacccacagacggccttctgcaattccgacctcgtcatcagggccaagttcgtggggacaccagaagtnaaccagaccaccttataccagcgttatgagatcaagatgaccaanatgtataaagggttccaagccttaggggatgccgctgacatccggttcgtctacacccccgccatggagagtgtctgcngatactttcacaggtcccacaaccgnagcgaggagtttctcattgntggaaaactgcaggatggacttttgcacatcactacctgcanttttgtggctccctggaacagcctgagcttagctcagcgccgggncttnaccaagacctacactgttggctgngaggaaatgcacaagtgcttccctgtttatccatcccctgcaaactgcagagtgggcactcattgcttgtaggacngaccagctcctacnangctcttnaaaaggnctttc

SEQ ID NO: 753 - DNA, 547 bp, Homo sapiens
  misc_feature (429): n equals a,t,g, or c
  misc_feature (454): n equals a,t,g, or c
  misc_feature (489): n equals a,t,g, or c
  misc_feature (503): n equals a,t,g, or c
  misc_feature (512): n equals a,t,g, or c
aagcacttgtccagatgagcagtgtgtgaattctcctggatcttaccagtgcgttccctgcacagaaggattccgaggctggaatggacagtgccttgatgtggacgagtgcctggaaccaaacgtctgcgcaaatggtgattgttccaaccttgaaggctcctacatgtgttcatgccacaaaggctatacccggactccggaccacaagcactgtagagatattgatgaatgtcagcaagggaatctatgtgtaaacgggcagtgcaaaaataccgagggctccttcaggtgcactgtggacaggggttaccagctgtcggcagctaaagaccagtttgaagacattgatgaatgccacaccgtcatctctgttgctcatgggcatgcaagaacactgaagctcttttccatgtgttttttgaccanggttacagaacatctgggcttgganacactgtgaaaaatttcaatgaatgcttggaaganaaaatttttgccanaaaagaaantgctttatactgcagggtcctatgatgtcttgtcc

SEQ ID NO: 754 - DNA, 384 bp, Homo sapiens
  misc_feature (307): n equals a,t,g, or c
  misc_feature (374): n equals a,t,g, or c
gctcggctccagcgccatggcgccctccaggaagttcttcgttgggggaaactggaagatgaacgggcggaagcagagtctgggggagctcatcggcactctgaacgcggccaaggtgccggccgacaccgaggtggtttgtgctccccctactgcctatatcgacttcgcccggcagaagctagatcccaagattgctgtggctgcgcagaactgctacaaagtgactaatggggcttttactggggagatcagccctggcatgatcaaagactgcggaccacgtgggtggtcctggggcactcanagagaagcatgtctttggggaatcagatgagctgattgggcagaaagtggcccatgctctggcaganggactcggat

SEQ ID NO: 755 - DNA, 253 bp, Homo sapiens
  misc_feature (60): n equals a,t,g, or c
  misc_feature (217): n equals a,t,g, or c
  misc_feature (240): n equals a,t,g, or c
  misc_feature (244): n equals a,t,g, or c
  misc_feature (252): n equals a,t,g, or c
  misc_feature (253): n equals a,t,g, or c
tgtagatctttgaagactctgattctctgagactgaggagagatgtcttaccagcagcancagtgcaagcagccctgccagccacctcctgtgtgccccacgccaaagtgcccaagagccatgtccacccccgaagtgccctgagccttacctgcctcctccttgtccacctgagcattgcccacctccaccttgccagtataaatgccctcctgtngcaaccataccaccctggcagcngaanttcccccnn

SEQ ID NO: 756 - DNA, 183 bp, Homo sapiens
  misc_feature (5): n equals a,t,g, or c
  misc_feature (9): n equals a,t,g, or c
  misc_feature (48): n equals a,t,g, or c
  misc_feature (57): n equals a,t,g, or c
  misc_feature (79): n equals a,t,g, or c
  misc_feature (83): n equals a,t,g, or c
  misc_feature (108): n equals a,t,g, or c
  misc_feature (141): n equals a,t,g, or c
  misc_feature (144): n equals a,t,g, or c
  misc_feature (146): n equals a,t,g, or c
  misc_feature (148): n equals a,t,g, or c
ggcanaaanaaggtaggaataaggctagacctttaacttccctaaggnatacttttntagctaccttctgccctgtgtntggnacctacatccttaatgattgtcctnttacccattctggaatttttttttttttaaaanaantncngaaagcattttgaaaaaaaaaaaacaaaaaaaaag

SEQ ID NO: 757 - DNA, 99 bp, Homo sapiens
  misc_feature (12): n equals a,t,g, or c
  misc_feature (26): n equals a,t,g, or c
  misc_feature (33): n equals a,t,g, or c
  misc_feature (45): n equals a,t,g, or c
  misc_feature (77): n equals a,t,g, or c
  misc_feature (79): n equals a,t,g, or c
  misc_feature (82): n equals a,t,g, or c
agcctttaatanatcatataggaaantggtagntgcagtacggtnggaattccgggtgactcagcgtccgggattgnancanctgggattggagtttgg

SEQ ID NO: 758 - DNA, 60 bp, Homo sapiens
  misc_feature (36): n equals a,t,g, or c
  misc_feature (38): n equals a,t,g, or c
  misc_feature (40): n equals a,t,g, or c
  misc_feature (45): n equals a,t,g, or c
  misc_feature (46): n equals a,t,g, or c
ggcacgaggttttttttttttttttttttttttttntntnttttnnttttttaaaaaaaa

SEQ ID NO: 759 - DNA, 66 bp, Homo sapiens
  misc_feature (6): n equals a,t,g, or c
  misc_feature (59): n equals a,t,g, or c
  misc_feature (63): n equals a,t,g, or c
  misc_feature (65): n equals a,t,g, or c
  misc_feature (66): n equals a,t,g, or c
agaganaaccgagtttttttttttttttttttttttttttttttttttttttttttttncccntnn

SEQ ID NO: 760 - DNA, 487 bp, Homo sapiens
  misc_feature (409): n equals a,t,g, or c
  misc_feature (433): n equals a,t,g, or c
  misc_feature (473): n equals a,t,g, or c
  misc_feature (475): n equals a,t,g, or c
  misc_feature (477): n equals a,t,g, or c
tacagatggagcaaatgtcctaacagagaaatagaggtgatgctgctaaagggagaaatgccaggcggacaaagttcagtgtcgggaattttccccgtgacattcactggggcatgagattttggaagaagttttttactttggtttagtctttttttccttcctttttattcagctagaatttctggtgggttgatggtagggtataatgtgtctgtgttgcttcaaattggtctgaaaggctatcctgctgaaagtcctgctttcctatctagcatttatttctctggcaaacttttctttcttttcttttttaaagtaaacttgtgtattgagcttaactgtatttcagtatttccagcttatgtgtacattattccaatgatacccaacagttatttatattttntaacaaattcacagtctgaatgangactttatttcatggattataataaggaatgaggtaattngngnctcacattca

SEQ ID NO: 761 - DNA, 422 bp, Homo sapiens
  misc_feature (253): n equals a,t,g, or c
  misc_feature (297): n equals a,t,g, or c
  misc_feature (350): n equals a,t,g, or c
  misc_feature (353): n equals a,t,g, or c
  misc_feature (382): n equals a,t,g, or c
  misc_feature (403): n equals a,t,g, or c
  misc_feature (406): n equals a,t,g, or c
gaaaaggctaaaatcatgaattagttacaagcaacagtaccaacttatgtgacccctgaggggtggggctgtgagctcttaatttgtttttgattctgaaaaactctgcttcctggcatccaggagttagagattgagcctttcatcttctttctcaaaactagtttttgatgctttctttcatgggaatagtcacttttttatttagtaaatcgcattgctggaaccaccaaggatgtggaatgtccttgantgtattatttatgcaagtcacagtcacgtttgccatcatggcantatttgaaacactaataatgtgtttttacttttttatccccgttaaaatgatnttnaaaaggaaaaaggtggttatagcccctanaatttctgggtccaaattatnccnaaaatttcctaaaaaa

SEQ ID NO: 762 - DNA, 375 bp, Homo sapiens
  misc_feature (279): n equals a,t,g, or c
  misc_feature (315): n equals a,t,g, or c
  misc_feature (373): n equals a,t,g, or c
tttgaccacttgccaagtccctgtctctttcagacacagacaagcttcatttaaattatttcaactgatgaagtaacaataaagttataaatgataatgatcagatgaaataatttataactttattgttacttcatcagtgtttccttttgaaaggtgtatgaattcattacatttttattctaatgtattatctgtagattagaagataaaatcaagcatgtatctgcctatactttgtgagttcacctgtctttatactcaaaagtgtcccttaanagtgtccttccctgaaataaatacctaagggagtgnaacagtctctggaggaccactttgagcctttggaagttaagggttcctcagccacctngt

SEQ ID NO: 763 - DNA, 372 bp, Homo sapiens
  misc_feature (261): n equals a,t,g, or c
  misc_feature (301): n equals a,t,g, or c
  misc_feature (320): n equals a,t,g, or c
  misc_feature (338): n equals a,t,g, or c
  misc_feature (344): n equals a,t,g, or c
  misc_feature (354): n equals a,t,g, or c
caatatgtagcttactctttttttccccccttcttaaaccaccagtggttcatttttaagattttttcatcaagagaagaataactttactaaattttatttctttatttgcaaaagaatctttattaaaacaaacaatcttaactatgcacatgatgtgaccagatcatcttgaaaatattcctctttagtaggaactctttgtttttaactcttggtatggtcagaatataatacttccataattacttataattcctntccgggtactgggggctataaatacaacttttttaaatgnaattcatggttatcaaccnggctccaagtaccattanggggtnccctatgggnaattaccttgggaaagtc

SEQ ID NO: 764 - DNA, 195 bp, Homo sapiens
  misc_feature (46): n equals a,t,g, or c
  misc_feature (52): n equals a,t,g, or c
  misc_feature (60): n equals a,t,g, or c
  misc_feature (67): n equals a,t,g, or c
  misc_feature (71): n equals a,t,g, or c
  misc_feature (86): n equals a,t,g, or c
  misc_feature (94): n equals a,t,g, or c
  misc_feature (128): n equals a,t,g, or c
  misc_feature (146): n equals a,t,g, or c
  misc_feature (151): n equals a,t,g, or c
  misc_feature (153): n equals a,t,g, or c
  misc_feature (183): n equals a,t,g, or c
cggacgcgtgggcggacgcgtggggaaaggtaagctctagcttaangtctangatttgtnctttganattnaggaaggtaaggatnggtcagangatgtaacttgatgtgagcagtaataaacctgtnttaaatatcatactgtgnatatntnattgaaaatttatttcagagcggaaaaacnttagctaaaatc

SEQ ID NO: 765 - DNA, 103 bp, Homo sapiens
  misc_feature (30): n equals a,t,g, or c
  misc_feature (76): n equals a,t,g, or c
  misc_feature (83): n equals a,t,g, or c
  misc_feature (91): n equals a,t,g, or c
  misc_feature (94): n equals a,t,g, or c
attaataatggataccattctaaacaagtnaatccaagttaagcccgttaaggagaaagaaattaaggttagcggntcatgtncaagctgngtntgaaagtgg

SEQ ID NO: 766 - DNA, 538 bp, Homo sapiens
  misc_feature (285): n equals a,t,g, or c
  misc_feature (316): n equals a,t,g, or c
  misc_feature (327): n equals a,t,g, or c
  misc_feature (379): n equals a,t,g, or c
  misc_feature (436): n equals a,t,g, or c
  misc_feature (441): n equals a,t,g, or c
  misc_feature (445): n equals a,t,g, or c
  misc_feature (450): n equals a,t,g, or c
  misc_feature (474): n equals a,t,g, or c
  misc_feature (504): n equals a,t,g, or c
  misc_feature (516): n equals a,t,g, or c
  misc_feature (520): n equals a,t,g, or c
  misc_feature (522): n equals a,t,g, or c
  misc_feature (526): n equals a,t,g, or c
  misc_feature (534): n equals a,t,g, or c
cccgcgcgggcgcaggcggccggaatggcggggcccggctggggtcccccgcgcctggacggcttcatcctcaccgagcgcctgggcagcggcacgtacgccacggtgtacaaggcctacgccaagaaggacactcgtgaagtggtagccataaagtgtgtagccaagaaaagtctgaacaaggcatcggtggagaacctcctcacggagattgagatcctcaaggcattcgacatccccacattgtgcagctgaaagactttcagtgtgagctgggggcggggncgctgccaaaaggagtggagaaggacatctntttcaggccgnctctctgcctcttaaaacaacagttgggaacagttgaaccaattaatcttancttcaatccattgggaagtttttttgccggccaaggggggggccggaaaccttggtncttcnggcntttcnaatcccaattaaaccccggccaanggaattttcttggccccttgaaagaaaaanggtttgggcccncccntnggtncctttccnaatg

SEQ ID NO: 767 - DNA, 415 bp, Homo sapiens
  misc_feature (350): n equals a,t,g, or c
ctttcccaagggaaacactcagctttctatagaaaattgcactttttgtcgagtaatcctctgcagtgatacttctggtagatgtcacccagtggtttttgttaggtcaaatgttcctgtatagtttttgcaaatagagctgtatactgtttaaatgtagcaggtgaactgaactggggtttgctcacctgcacagtaaaggcaaacttcaacagcaaaactgcaaaaaggtggtttttgcagtaggagaaaggaggatgtttatttgcagggcgccaagcaaggagaattgggcagctcatgcttgagacccaatctccatgatgacctacaagctagagtatttaaangcagtggtaaatttccaggaaagccagaagttaaaggccaaaattgtaaatcagtcgagatcggg

SEQ ID NO: 768 - DNA, 425 bp, Homo sapiens
  misc_feature (351): n equals a,t,g, or c
  misc_feature (381): n equals a,t,g, or c
  misc_feature (389): n equals a,t,g, or c
  misc_feature (422): n equals a,t,g, or c
  misc_feature (423): n equals a,t,g, or c
ctttgtacaggggctcagttcagggaagagttgagcttctctctgaggggtccctagggggacccctcaggccaggccctgatccagttctccagggtctttctcagggtcaggtccatggggagaccatggggtgcttgtctgacactgacctcgccctgctgagtccccccatcagactgtccttcctctgcagcgagtgtctgcagggtctggatccaggaaaggaattctgatctgtggaagtttgtctcccccgtgtgtgtcctgcactaaatgtccaaaccctgatacaggatgtaatgcagagagggccacaggcacaacccaggcctgacaatcccgtatgtnggaagtagaactgacccccaacacccagangtcatgtngaaatactcacggtatacatggaaaaaaaaaannaa

SEQ ID NO: 769 - DNA, 256 bp, Homo sapiens
  misc_feature (34): n equals a,t,g, or c
  misc_feature (60): n equals a,t,g, or c
  misc_feature (83): n equals a,t,g, or c
  misc_feature (85): n equals a,t,g, or c
  misc_feature (112): n equals a,t,g, or c
  misc_feature (120): n equals a,t,g, or c
  misc_feature (151): n equals a,t,g, or c
  misc_feature (163): n equals a,t,g, or c
  misc_feature (200): n equals a,t,g, or c
  misc_feature (211): n equals a,t,g, or c
  misc_feature (235): n equals a,t,g, or c
  misc_feature (250): n equals a,t,g, or c
attctagatgtagcttgtgcagatgtagcagganaataggaaaacctaccatctcagtgngcaccagctggcctcccaaaggngnggcagccgtgcttatatttttatggtnacaatggncacaaaattattatcaacctaactaaaacantccttttctctnttttcctggaattatcatggagttttctaattctctnttttgggaatngtagattgtttttgaaatgctttnacgatgttaaaatantttatt

SEQ ID NO: 770 - DNA, 316 bp, Homo sapiens
  misc_feature (3): n equals a,t,g, or c
  misc_feature (46): n equals a,t,g, or c
  misc_feature (158): n equals a,t,g, or c
  misc_feature (173): n equals a,t,g, or c
  misc_feature (200): n equals a,t,g, or c
  misc_feature (228): n equals a,t,g, or c
  misc_feature (266): n equals a,t,g, or c
  misc_feature (267): n equals a,t,g, or c
  misc_feature (281): n equals a,t,g, or c
  misc_feature (284): n equals a,t,g, or c
  misc_feature (291): n equals a,t,g, or c
  misc_feature (294): n equals a,t,g, or c
ggnagaggttcaacgatgtggtgtggcatgtaagctggtccatcanagccaacatcctggctgtctctggtggagacaataaggaggagttacagatgcagccacagattgatcatctgcctttaacgtgaatcggagatgctttgtaatctactgtnccagctgaagcactncatgttacgaggaagaaactacaagtnatgttcaaatctattttgggtcattttnatgtacctttgggttcaggcattatttggggggttttnnttccaaaggaactnaantaaagtnatnttgcttattaaaaaaaggaaaa

SEQ ID NO: 771 - DNA, 68 bp, Homo sapiens
  misc_feature (8): n equals a,t,g, or c
  misc_feature (14): n equals a,t,g, or c
  misc_feature (22): n equals a,t,g, or c
  misc_feature (32): n equals a,t,g, or c
  misc_feature (36): n equals a,t,g, or c
  misc_feature (55): n equals a,t,g, or c
caaaagcnggagcnccaccgcnggcgaccgcnctanaactagtggatcccccggnctgcaggaattca

SEQ ID NO: 772 - DNA, 258 bp, Homo sapiens
  misc_feature (17): n equals a,t,g, or c
  misc_feature (19): n equals a,t,g, or c
  misc_feature (42): n equals a,t,g, or c
  misc_feature (45): n equals a,t,g, or c
  misc_feature (47): n equals a,t,g, or c
  misc_feature (60): n equals a,t,g, or c
  misc_feature (61): n equals a,t,g, or c
  misc_feature (139): n equals a,t,g, or c
  misc_feature (155): n equals a,t,g, or c
  misc_feature (189): n equals a,t,g, or c
  misc_feature (225): n equals a,t,g, or c
  misc_feature (235): n equals a,t,g, or c
  misc_feature (250): n equals a,t,g, or c
  misc_feature (257): n equals a,t,g, or c
cggacggtgggtttttntnttttttttttttttttttttttnttntnttttttttttatnnttgggtcatttccacatgctttattccagcaatcaaaataattaaaaacatctcaaattattatacacatacaaaatnggtacagagtcttttncttcctcccacccctagggggaaaaactgctttntgctttgggaagttgtctctgaaacccggggacagnggacgcaggncagactaggaggganccgggang

SEQ ID NO: 773 - DNA, 587 bp, Homo sapiens
  misc_feature (535): n equals a,t,g, or c
  misc_feature (559): n equals a,t,g, or c
  misc_feature (565): n equals a,t,g, or c
  misc_feature (570): n equals a,t,g, or c
  misc_feature (572): n equals a,t,g, or c
ggatcccaactgctcctgcgccgccggtaagaggctggggatgcccagtgtagactgtagcgctagagaagcaatttctgacccctctttctttctctggtcactcaatttcaggacaggagttgctccttcccaaagagttttggggtatctttctctccattctaggttattcggagccccctttttaccgttaaggagatctgagttaatggcttgctcaagttcccaggaatcggttgtggactgaggaactcggccccgggctcttagtacgccgtcccttgttcaggtatccagggacggttctcacctctgtcttttctccttgcaggtgactcctgcacctgcgccggctcctgcaaatgcaaagagtgcaaatgcacctcctgcaagaaaagtaagtgggatcctctctttcctctaccccttcctgtcctccagcctgtcccctcttcaccatcctcaggggaattaaagcaagtctggggatgccccattgcgccgggaaattggtggcctcctcagtgatccntatcaaggagaagcaaggaatccntaattnccggngnccgttgtacttaact

SEQ ID NO: 774 - DNA, 89 bp, Homo sapiens
  misc_feature (20): n equals a,t,g, or c
  misc_feature (74): n equals a,t,g, or c
  misc_feature (76): n equals a,t,g, or c
  misc_feature (77): n equals a,t,g, or c
  misc_feature (79): n equals a,t,g, or c
  misc_feature (83): n equals a,t,g, or c
  misc_feature (86): n equals a,t,g, or c
ggcagagggaaacatcaggnatgctaaaaaaaaaaaaaaaaaaaaaaaaaaaaaaaaaaaaaaaaaaaaaaaanannanaaanaantat

SEQ ID NO: 775 - DNA, 113 bp, Homo sapiens
  misc_feature (10): n equals a,t,g, or c
  misc_feature (30): n equals a,t,g, or c
  misc_feature (32): n equals a,t,g, or c
  misc_feature (57): n equals a,t,g, or c
  misc_feature (59): n equals a,t,g, or c
  misc_feature (75): n equals a,t,g, or c
  misc_feature (77): n equals a,t,g, or c
  misc_feature (106): n equals a,t,g, or c
ggtccggcgnggtggagggaaacgcctccntntctatataaggaatttcccggtgtntncgggtccttttccctntnttcagagtggggggcccaaatttgggcgntctgttt

SEQ ID NO: 776 - DNA, 66 bp, Homo sapiens
  misc_feature (5): n equals a,t,g, or c
  misc_feature (13): n equals a,t,g, or c
  misc_feature (49): n equals a,t,g, or c
  misc_feature (65): n equals a,t,g, or c
ggcanaggatttnaaccctcaccttcgtgtttcccccaatgtttaaaangtttggatggtttgtng

SEQ ID NO: 777 - DNA, 441 bp, Homo sapiens
  misc_feature (401): n equals a,t,g, or c
  misc_feature (436): n equals a,t,g, or c
atttgtatgaaagaacttaagcaaccttaatattggctgagacttttaaaagagaaggagaatttacttttttgcctaattaggaggaagcttggtcataaggaaaaagagctgtgtttaggaaatagtgtgtgccctttgaattaatggagtgacaccgtgattcatgacaggattccatttactggctgtatgccagctgctgacagtctataagtcttaatagagatggagtagaggagctgaaggttggcatctgctcattgatgacaactatgtttacaatatgttgtggactagttggggcactgaggcaggagaatcacgtggagcccacgggttcaagaccagcctgggaaacatagcaagaccttgtttctaaaaaaaaaaaaaaaaaaacncgagggggggcccggtacccaattcgccctaaagngagtc

SEQ ID NO: 778 - DNA, 483 bp, Homo sapiens
  misc_feature (335): n equals a,t,g, or c
  misc_feature (356): n equals a,t,g, or c
  misc_feature (471): n equals a,t,g, or c
  misc_feature (472): n equals a,t,g, or c
  misc_feature (478): n equals a,t,g, or c
  misc_feature (481): n equals a,t,g, or c
  misc_feature (482): n equals a,t,g, or c
gcttacttttaaccagtgaaattgacctgcccgtgaagaggcgggcataacacagcaagacgagaagaccctatggagctttaatttattaatgcaaacagtacctaacaaacccacaggtcctaaactaccaaacctgcattaaaaatttcggttggggcgacctcggagcagaacccaacctccgagcagtacatgctaagacttcaccagtcaaagcgaactactatactcaattgatccaataacttgaccaacggaacaagttaccctagggataacagcgcaatcctattctagagtccatatcaacaatagggtttacgacctcgatnttggatcaggacatcccgatngtgcagccgctattaaaggttcgtttgttcaacgattaaagtcctacgtgatctgagttcagaccggagtaatccaggtcggtttctatctacttcaaattcctccctggaaaannagaagnggnng

SEQ ID NO: 779 - DNA, 389 bp, Homo sapiens
  misc_feature (261): n equals a,t,g, or c
  misc_feature (325): n equals a,t,g, or c
  misc_feature (337): n equals a,t,g, or c
  misc_feature (362): n equals a,t,g, or c
  misc_feature (367): n equals a,t,g, or c
  misc_feature (389): n equals a,t,g, or c
ccctcttcccggctccagctccgccgccagctccagcctttgctccccctcccaaagtcccctccccggagcggagcgcacctagggtccctcttccgtccccccagcccagctacccgttcagaccagcagcctcggggggcacccccccgccagcctgcctccctcccgctcagccctgccaggttcccccagccatgaatctcttccgattcctgggaaaactctcccaactcctcgccatcatcttgctactgctcnaaatctggaattcccgctcgtgcgccgaaattcaggaaaaaaacagtcccgtttggtgtggggntttcaatggccnaatttgaaatcctttcacaataatntttantctaaaaatttttttaaagggn

SEQ ID NO: 780 - DNA, 66 bp, Homo sapiens
  misc_feature (18): n equals a,t,g, or c
ttgtttttaaaactatgnaccaggtttctaatgatgaaataaagcacctgtttgttttataccaaa

SEQ ID NO: 781 - DNA, 255 bp, Homo sapiens
  misc_feature (46): n equals a,t,g, or c
  misc_feature (83): n equals a,t,g, or c
  misc_feature (94): n equals a,t,g, or c
  misc_feature (133): n equals a,t,g, or c
  misc_feature (150): n equals a,t,g, or c
  misc_feature (163): n equals a,t,g, or c
  misc_feature (172): n equals a,t,g, or c
  misc_feature (179): n equals a,t,g, or c
  misc_feature (182): n equals a,t,g, or c
  misc_feature (184): n equals a,t,g, or c
  misc_feature (209): n equals a,t,g, or c
  misc_feature (224): n equals a,t,g, or c
ggcagagcagagcagacgcacaggccggaaaaggcgcatctaacgngtatctaggctttggtaactgcggacaagttgctttnacctgaatttnatgatacatttcattaaggttccagttataaaatatttngttaaatatttattaangtggactatagantgcaaactnccatttnccngntaaacttgtttttaaattatggccntaggtaacccatatngtagggtattaatttccttggaaccaaacca

SEQ ID NO: 782 - DNA, 348 bp, Homo sapiens
  misc_feature (3): n equals a,t,g, or c
  misc_feature (28): n equals a,t,g, or c
  misc_feature (32): n equals a,t,g, or c
  misc_feature (75): n equals a,t,g, or c
  misc_feature (123): n equals a,t,g, or c
  misc_feature (135): n equals a,t,g, or c
  misc_feature (178): n equals a,t,g, or c
  misc_feature (182): n equals a,t,g, or c
  misc_feature (296): n equals a,t,g, or c
  misc_feature (298): n equals a,t,g, or c
  misc_feature (307): n equals a,t,g, or c
  misc_feature (323): n equals a,t,g, or c
  misc_feature (324): n equals a,t,g, or c
  misc_feature (345): n equals a,t,g, or c
  misc_feature (346): n equals a,t,g, or c
ttnagtagagacagggtttcaccatgtnagtnaggctggtctcgaactcctgacctcaggtgaatccacccgagnttggcctcccaagtggctgggcattataggcgtgagcactcacgtccncgcctcaaaatngcatattcaaagaagcaatttcagttcctttctaagctttgtnagtnaaggggctccactgacttcctaggccctgtaaatttaaaccagtctttaaggttttgccaggaaagttcccttctttccaagtgggtttttccaaatgggcacaatggcaagcnanacagaggangaaacattaaaaaaannaaaaaaaatttgggggggggnncc

SEQ ID NO: 783 - DNA, 160 bp, Homo sapiens
  misc_feature (29): n equals a,t,g, or c
  misc_feature (47): n equals a,t,g, or c
  misc_feature (49): n equals a,t,g, or c
  misc_feature (78): n equals a,t,g, or c
  misc_feature (82): n equals a,t,g, or c
  misc_feature (131): n equals a,t,g, or c
  misc_feature (141): n equals a,t,g, or c
  misc_feature (142): n equals a,t,g, or c
  misc_feature (144): n equals a,t,g, or c
  misc_feature (146): n equals a,t,g, or c
ggcacgagctacaatggcactgtggactnatgtttccttcgccgagngnctggagcggggatctgatgaaaaggtcanactnaaacgccttgcacggcttctcggcttgatcacagctccctaggtaggtnaccacagagnngncncttctagtgagcct

SEQ ID NO: 784 - DNA, 81 bp, Homo sapiens
  misc_feature (25): n equals a,t,g, or c
  misc_feature (77): n equals a,t,g, or c
  misc_feature (78): n equals a,t,g, or c
  misc_feature (79): n equals a,t,g, or c
  misc_feature (81): n equals a,t,g, or c
ggcacgagccgggatcgtgccattncattccagtctgggtgacagagctagactccatctcaaaaaaaaaaaaaaannngn

SEQ ID NO: 785 - DNA, 541 bp, Homo sapiens
  misc_feature (175): n equals a,t,g, or c
  misc_feature (265): n equals a,t,g, or c
  misc_feature (354): n equals a,t,g, or c
  misc_feature (355): n equals a,t,g, or c
  misc_feature (356): n equals a,t,g, or c
  misc_feature (361): n equals a,t,g, or c
  misc_feature (364): n equals a,t,g, or c
  misc_feature (369): n equals a,t,g, or c
  misc_feature (393): n equals a,t,g, or c
  misc_feature (399): n equals a,t,g, or c
  misc_feature (405): n equals a,t,g, or c
  misc_feature (411): n equals a,t,g, or c
  misc_feature (463): n equals a,t,g, or c
  misc_feature (489): n equals a,t,g, or c
  misc_feature (521): n equals a,t,g, or c
  misc_feature (530): n equals a,t,g, or c
  misc_feature (539): n equals a,t,g, or c
gagctgcaggcatcagagaaccagccctgctcacgccatgcccgcccccgccttccctcttccctcttccctctccctgcccagccctcccttccttcctctgccggcaaggcagggacccacagtggctgcctgcctccgggagggaaggagagggagggtgggtgggtggganggggccttcctccagggaatgtgactctcccaggccccagaatagctcctggacccaagcccaaggcccagcctgggacaaagctccganggtcggctggccggagctatttttacctcccgcctcccctgctggtgcccccacctggacgtcttgctgcagagtctgacactggattnnnaaaanctnaaaangaaccctggtacccaattctgggncccggncctaanctcggncccaacccatcatctgtggacaatggagtctggaataaatgctgtttgtcanatcaacaaaaaaaaaaaaaaaggggnggccgctttagaggattcaaagcttaagtaanggtgcatgngaagttcanaa

SEQ ID NO: 786 - DNA, 433 bp, Homo sapiens
  misc_feature (230): n equals a,t,g, or c
  misc_feature (350): n equals a,t,g, or c
  misc_feature (400): n equals a,t,g, or c
  misc_feature (402): n equals a,t,g, or c
  misc_feature (405): n equals a,t,g, or c
  misc_feature (422): n equals a,t,g, or c
cccacgcgtccggtctaacacgtgcgcgagtcgggggctcgcacgaaagccgccgtggcgcaatgaaggtgaaggccggcgcgctcgccggccgaggtgggatcccgaggcctctccagtccgccgagggcgcaccaccggcccgtctcgcccgccgcgccggggaggtggagcacgagcgcacgtgttaggacccgaaagatggtgaactatgcctgggcagggcgaancagaaggaaactctggtggaggtccgtagcggtcctgacgtgcaaatcggtcgtccgacctgggtataggggcgaaagactaaatcgaaccatcttagtaagctggtttccctccgaaantttccctcaagataagcttggcgctctcgcaagaccccgaaggaaccccngncanggaatttttatccggtnaaagcgaattg

SEQ ID NO: 787 - DNA, 527 bp, Homo sapiens
  misc_feature (492): n equals a,t,g, or c
cccaggatgtgtggcgagagcctgggccagcccacagcgttcctagtcaggcagccacaccttggtcctcatcttggtcccttccaatctgaaacctcgtgcctggctcgtctgccacctacatttctctttccagctgctgttttgtaaaaagaaaaagaaaaaagaagcccaaactagtgagagtaatatctaattatctcattttttgtaggtctgtgataaagaacttagtcatcccttccacctcctactgtgaagaacagaccctgggtcccacactgaaatcccctctagtcacccattcccaccccccagggagctgcctcccaggcagggggtgcagaaaatgattgatgggctggggaaccctggagagcctcgactccggaagtctcaaggtgcctcctcctctccttagctggcccgttggttttctgagcagggggctgaactgtgaacaagtcagacaaataaagcaagggtctgcancatctgcaatgtcaaaaaaaaaaaaaaaaaaaaaa

SEQ ID NO: 788 - DNA, 203 bp, Homo sapiens
  misc_feature (121): n equals a,t,g, or c
  misc_feature (160): n equals a,t,g, or c
  misc_feature (179): n equals a,t,g, or c
  misc_feature (181): n equals a,t,g, or c
  misc_feature (192): n equals a,t,g, or c
gcttcatgtggtctgacaatttatttttgccatcatttttttaattaaagaaaaaatttccagaagaggaaaaaaaaactacaaaaaacaaaacattgaaggttgatattttatgtggaanaacatttgaattgaattcagaatttttctgaaggtgtanatacttttttttttttttnancaaaaaccctnatttcaaaagg

SEQ ID NO: 789 - DNA, 124 bp, Homo sapiens
  misc_feature (38): n equals a,t,g, or c
  misc_feature (70): n equals a,t,g, or c
  misc_feature (87): n equals a,t,g, or c
  misc_feature (94): n equals a,t,g, or c
  misc_feature (113): n equals a,t,g, or c
ggcacgagcagcctacagccgcctgcatctgtatccancgccaggtcccgccagtcccagctgcgcgcgncccccagtcccgcaccngttcggnccaggctaagttagccctnaccatgccggt

SEQ ID NO: 790 - DNA, 293 bp, Homo sapiens
  misc_feature (5): n equals a,t,g, or c
  misc_feature (44): n equals a,t,g, or c
  misc_feature (52): n equals a,t,g, or c
  misc_feature (79): n equals a,t,g, or c
  misc_feature (125): n equals a,t,g, or c
  misc_feature (134): n equals a,t,g, or c
  misc_feature (141): n equals a,t,g, or c
  misc_feature (160): n equals a,t,g, or c
  misc_feature (179): n equals a,t,g, or c
  misc_feature (184): n equals a,t,g, or c
  misc_feature (222): n equals a,t,g, or c
  misc_feature (266): n equals a,t,g, or c
  misc_feature (275): n equals a,t,g, or c
  misc_feature (281): n equals a,t,g, or c
  misc_feature (287): n equals a,t,g, or c
ggcanagcggcagtccaggacctgcaggccccagaggacctgtnggacccantggacctcctggcaaagatggaaccantggacatccaggtgccattggaccaccagggcctcgaggtaacagnggtgaaagnggatctnagggctccccagggccacncagggcaaccagggccctnctggnacctcctggtgcccctggtccttgctgtggtggtgttngagccgctgccattgctgggattgggaggttgaaaaagcttggncggttttgnccccgngtttantggggg

SEQ ID NO: 791 - DNA, 129 bp, Homo sapiens
  misc_feature (93): n equals a,t,g, or c
  misc_feature (104): n equals a,t,g, or c
  misc_feature (113): n equals a,t,g, or c
  misc_feature (116): n equals a,t,g, or c
  misc_feature (119): n equals a,t,g, or c
gaaaaaaaaaaaaaaaaaaaaaaaaaaaaaaaaaaaaaaaaaaaaaaaaaaaaaaaaaaaaaaaaaaaaaaaaaaaaggggcggccgttttanaggatccaagnttacgtacncgngcntgcaacgtca

SEQ ID NO: 792 - DNA, 267 bp, Homo sapiens
  misc_feature (247): n equals a,t,g, or c
  misc_feature (250): n equals a,t,g, or c
  misc_feature (253): n equals a,t,g, or c
  misc_feature (265): n equals a,t,g, or c
  misc_feature (267): n equals a,t,g, or c
ggcacgagcggccttgagcgcgacgaagacgtgtaggcctgctttccgaggggcgagcgcggcgccgcggggaggagggcctgcgcgcagtcccgggcgcgttctagggcgccatgctgcgggaagtctcgcgcgattagtggggaggtctcgcggcttctggctacttggtggcgaggtgaagagcttctgcaggtgctgggggcggcgaacgcggcgggaaagaaaaaaaaaaaaaaaaaaaaanctnggnaagtatttttanan

SEQ ID NO: 793 - DNA, 453 bp, Homo sapiens
  misc_feature (68): n equals a,t,g, or c
  misc_feature (347): n equals a,t,g, or c
  misc_feature (443): n equals a,t,g, or c
ggggaaaagttttggcaggagcgggagaattctgcggacctgcgggacggcggcggtggcgccgtagnagccggggacaggtcagtccgagacgagagaagcggtcagtgttgtacagtgttttgggcatgcacgtgatactcacacagtggcttctgctcaccaacagatgaagacagatgcaccaacgaggctgatgggaaccatcctgtagaggtccatctgcgttcagacccagacgatgccagagctatgactgggcctgcaggtgtggcgccgaggggagatcagccatggagcagccacaggaggaagcccctgaggtccgggaagaggaggagaaagangaagtggcagaagcagaaggagccccagagctcaattggggaccacagcatgcacttccttccagcagctacacagactctcccggagctcctcgncaaccttatg

SEQ ID NO: 794 - DNA, 141 bp, Homo sapiens
  misc_feature (15): n equals a,t,g, or c
  misc_feature (17): n equals a,t,g, or c
  misc_feature (30): n equals a,t,g, or c
  misc_feature (54): n equals a,t,g, or c
  misc_feature (63): n equals a,t,g, or c
  misc_feature (108): n equals a,t,g, or c
  misc_feature (132): n equals a,t,g, or c
  misc_feature (137): n equals a,t,g, or c
caacgaccgcgtttncntggcacggggtcnggcccgcctggccctgggaaagcntcccacggngggggcgcgccggtctcccggagcgggaccgggtcggaggatggncgagaatcacgagcgacggtggtngtggngtgt

SEQ ID NO: 795 - DNA, 167 bp, Homo sapiens
  misc_feature (46): n equals a,t,g, or c
  misc_feature (55): n equals a,t,g, or c
  misc_feature (56): n equals a,t,g, or c
  misc_feature (61): n equals a,t,g, or c
  misc_feature (93): n equals a,t,g, or c
  misc_feature (112): n equals a,t,g, or c
  misc_feature (146): n equals a,t,g, or c
  misc_feature (149): n equals a,t,g, or c
  misc_feature (164): n equals a,t,g, or c
ggggacccacccgagggtccagccaccagccccctcactaatagcngccaccccnncagcngcggcacagcagcagcgacgcagcggcgacantcagagcagggaggccgcnccacctgcgggccggccggagcgggcagccccangcnccctccccgggcacncgc

SEQ ID NO: 796 - DNA, 331 bp, Homo sapiens
  misc_feature (8): n equals a,t,g, or c
  misc_feature (10): n equals a,t,g, or c
  misc_feature (16): n equals a,t,g, or c
  misc_feature (20): n equals a,t,g, or c
  misc_feature (34): n equals a,t,g, or c
  misc_feature (41): n equals a,t,g, or c
  misc_feature (54): n equals a,t,g, or c
  misc_feature (56): n equals a,t,g, or c
  misc_feature (58): n equals a,t,g, or c
  misc_feature (61): n equals a,t,g, or c
  misc_feature (79): n equals a,t,g, or c
  misc_feature (88): n equals a,t,g, or c
  misc_feature (90): n equals a,t,g, or c
  misc_feature (91): n equals a,t,g, or c
  misc_feature (101): n equals a,t,g, or c
  misc_feature (104): n equals a,t,g, or c
  misc_feature (105): n equals a,t,g, or c
  misc_feature (114): n equals a,t,g, or c
  misc_feature (115): n equals a,t,g, or c
  misc_feature (116): n equals a,t,g, or c
  misc_feature (123): n equals a,t,g, or c
  misc_feature (124): n equals a,t,g, or c
  misc_feature (125): n equals a,t,g, or c
  misc_feature (126): n equals a,t,g, or c
  misc_feature (131): n equals a,t,g, or c
  misc_feature (132): n equals a,t,g, or c
  misc_feature (146): n equals a,t,g, or c
  misc_feature (192): n equals a,t,g, or c
  misc_feature (225): n equals a,t,g, or c
  misc_feature (228): n equals a,t,g, or c
  misc_feature (241): n equals a,t,g, or c
  misc_feature (242): n equals a,t,g, or c
  misc_feature (244): n equals a,t,g, or c
  misc_feature (260): n equals a,t,g, or c
  misc_feature (280): n equals a,t,g, or c
  misc_feature (328): n equals a,t,g, or c
aattcggnancacgcnacgncataccgtggcagnttctgtntgagacgaacatncngnagnctccactcagctaatgtnacaacatgngnnctacttctcnctnncttttacannnacaggannnnggccnnagttaatatatccngtgtacctcactgtccaatatgaaaaccgtaaagtgccttataggnatttgcgtaactaacacaccctggttcattganctntacttgctgaagnngnaaaagacaggataagntttcaatagtggcataccanatgggacttttgatgaaatgaatatcaatattttctgcaattccatgngct

SEQ ID NO: 797 - DNA, 699 bp, Homo sapiens
  misc_feature (404): n equals a,t,g, or c
  misc_feature (521): n equals a,t,g, or c
  misc_feature (564): n equals a,t,g, or c
  misc_feature (589): n equals a,t,g, or c
  misc_feature (597): n equals a,t,g, or c
  misc_feature (598): n equals a,t,g, or c
  misc_feature (635): n equals a,t,g, or c
  misc_feature (643): n equals a,t,g, or c
  misc_feature (657): n equals a,t,g, or c
  misc_feature (678): n equals a,t,g, or c
  misc_feature (695): n equals a,t,g, or c
gctccaccttactaccagacaaccttagccaaaccatttacccaaataaagtataggcgatagaaattgaaacctggcgcaatagatatagtaccgcaagggaaagatgaaaaattataaccaagcataatatagcaaggactaacccctataccttctgcataatgaattaactagaaataactttgcaaggagagccaaagctaagacccccgaaaccagacgagctacctaagaacagctaaaagagcacacccgtctatgtagcaaaatagtgggaagatttataggtagaggcgacaaacctaccgagcctggtgatagctggttgtccaagatagaatcttagttcaactttaaatttgcccacagaaccctctaaatccccttgtaaatttaactgntagtccaaagaggaacagctctttggacactaggaaaaaaccttgtagagagagtaaaaaatttaacacccatagtaggcctaaaagcagccaccaattaagaaagcgttcaagctnaacacccactacctaaaaaaatcccaaacatataactgaactnctacacccaattgggccaatctatnaccctatnnaagaactaatggtagtataagtacatgaaaaccattnttcttcgnataagccttgcgtnagaattaaaacactgaactgnacattaaacagccaatntcta

SEQ ID NO: 798 - DNA, 138 bp, Homo sapiens
  misc_feature (115): n equals a,t,g, or c
  misc_feature (120): n equals a,t,g, or c
  misc_feature (127): n equals a,t,g, or c
  misc_feature (128): n equals a,t,g, or c
  misc_feature (133): n equals a,t,g, or c
cccggcacagagtcgatgctcaataaatgtgtgttgactgcatgaatgacctggaaaaaaaaaaaaaaaaaaaaaaaaaaaaaaaaaaaaaaaaaaaaaaaaaaaaaaaaaaaanccccnggggggnnccccnccccc

SEQ ID NO: 799 - DNA, 496 bp, Homo sapiens
  misc_feature (9): n equals a,t,g, or c
  misc_feature (414): n equals a,t,g, or c
  misc_feature (442): n equals a,t,g, or c
  misc_feature (443): n equals a,t,g, or c
  misc_feature (485): n equals a,t,g, or c
  misc_feature (490): n equals a,t,g, or c
cacactgtnatgctagcctcacgaaactggaataagccttcgaaaagaaattgtccttgaagcttgtatctgatatcagcactggattgtagaacttgttgctgattttgaccttgtattgaagttaactgttccccttggtatttgtttaataccctgtacatatctttgagttcaacctttagtacgtgtggcttggtcacttcgtggctaaggtaagaacgtgcttgtggaagacaagtctgtggcttggtgagtctgtgtggccagcagcctctgatctgtgcagggtattaacgtgtcaaggctgagtgttctggggaattctctagaggctggcaagaaccagttggttttgtccttgcggggtctgtcaagggttggaaatcccaagccgtaggacccagttccctnccttaaccgaagtctttggccaaacacnngggccgtaactggccttgagttggaacggttgcataagccgnaaagnatcaac

SEQ ID NO: 800 - DNA, 516 bp, Homo sapiens
  misc_feature (12): n equals a,t,g, or c
  misc_feature (29): n equals a,t,g, or c
  misc_feature (30): n equals a,t,g, or c
  misc_feature (44): n equals a,t,g, or c
  misc_feature (80): n equals a,t,g, or c
  misc_feature (107): n equals a,t,g, or c
  misc_feature (122): n equals a,t,g, or c
  misc_feature (149): n equals a,t,g, or c
  misc_feature (157): n equals a,t,g, or c
  misc_feature (164): n equals a,t,g, or c
  misc_feature (166): n equals a,t,g, or c
  misc_feature (169): n equals a,t,g, or c
  misc_feature (173): n equals a,t,g, or c
  misc_feature (183): n equals a,t,g, or c
  misc_feature (188): n equals a,t,g, or c
  misc_feature (190): n equals a,t,g, or c
  misc_feature (193): n equals a,t,g, or c
  misc_feature (199): n equals a,t,g, or c
  misc_feature (208): n equals a,t,g, or c
  misc_feature (220): n equals a,t,g, or c
  misc_feature (256): n equals a,t,g, or c
  misc_feature (270): n equals a,t,g, or c
  misc_feature (273): n equals a,t,g, or c
  misc_feature (275): n equals a,t,g, or c
  misc_feature (294): n equals a,t,g, or c
  misc_feature (296): n equals a,t,g, or c
  misc_feature (335): n equals a,t,g, or c
  misc_feature (336): n equals a,t,g, or c
  misc_feature (341): n equals a,t,g, or c
  misc_feature (362): n equals a,t,g, or c
  misc_feature (370): n equals a,t,g, or c
  misc_feature (487): n equals a,t,g, or c
  misc_feature (500): n equals a,t,g, or c
  misc_feature (501): n equals a,t,g, or c
gctgaaaaaggngggggggagccaattannacgcccagacggantaaccccaggccccgccacaccaccccttgccaaantcatctgcctgctccccggggggagangaccgccggcctctnctactagcccaccagcccaccaggganaaaataanccatganangcngcgnccgccacccngtgtncncantccccnccttcccgnttcccttagaancctgccgcgtcctatctcatgacgctcatggaaccnctttctttgatctnctntntcttatctccccctctttntngttctaaagaaaatcattttgatgcaaggtcctgcctgnnatcanatccgaagtgctcctgcagtnaccctttncctggcatttctcttccacgcgacaagtctgctagtgagatcttgcatgactcactttgtttccaaaacccggggctattttgcatctcaagtttcctggggcctgcttcctgtgtnccacttaagggcnnctgggccaagactgt

SEQ ID NO: 801 - DNA, 284 bp, Homo sapiens
  misc_feature (1): n equals a,t,g, or c
  misc_feature (6): n equals a,t,g, or c
  misc_feature (12): n equals a,t,g, or c
  misc_feature (28): n equals a,t,g, or c
naagcncccggngaacttggggaaggcncgcctgcaggtaccggtccggaattcccgggtcgaccttcgcgtttttatatatatagatatatatatagatatatatagatatatatatagatatatatagatatatatatagatatatatagatatatatagatatatatagatatatagatatatatagatatatatagatatatagatatatatagatatatatagatatatagatatatatagatatatagatatatatatatctggctcatgcatgaaaa

SEQ ID NO: 802 - DNA, 153 bp, Homo sapiens
  misc_feature (46): n equals a,t,g, or c
  misc_feature (92): n equals a,t,g, or c
  misc_feature (119): n equals a,t,g, or c
  misc_feature (134): n equals a,t,g, or c
  misc_feature (140): n equals a,t,g, or c
  misc_feature (143): n equals a,t,g, or c
cggacggctgtgtagcgcgtgggtgtaagacttgcccaagtcccanagcacctcacctcccgaagccaccatccccaccctgtcttccacanccgcctgaaagccacaatgagaatgantcacactgaggcctngatgtnctntaatcacttg

SEQ ID NO: 803 - DNA, 383 bp, Homo sapiens
  misc_feature (271): n equals a,t,g, or c
  misc_feature (301): n equals a,t,g, or c
  misc_feature (370): n equals a,t,g, or c
  misc_feature (374): n equals a,t,g, or c
  misc_feature (375): n equals a,t,g, or c
  misc_feature (383): n equals a,t,g, or c
cacgtgagattaaaaccaattttttccccattttttctccttttttctcttgctgcccacattgtgcctttattttatgagccccagttttctgggcttagtttaaaaaaaaaatcaagtctaaacattgcatttagaaagcttttgttcttggataaaaagtcatacactttaaaaaaaaaaaaaactttttccaggaaaatatattgaaatcatgctgctgagcctctattttctttctttggatgttttggattcagtattcctttanccataaatttttagcatttaaaaattcacnggatggtacattaagccaataaactggctttaatggattacccaaaaaaaaaaaaaaaaaaaggggggncgcnncagagggn

SEQ ID NO: 804 - DNA, 509 bp, Homo sapiens
  misc_feature (94): n equals a,t,g, or c
  misc_feature (397): n equals a,t,g, or c
  misc_feature (399): n equals a,t,g, or c
  misc_feature (401): n equals a,t,g, or c
  misc_feature (434): n equals a,t,g, or c
  misc_feature (478): n equals a,t,g, or c
  misc_feature (501): n equals a,t,g, or c
  misc_feature (504): n equals a,t,g, or c
ggcacgagctgggttgtcctttgcatctgcacgtgttcgcagtcgtttccgcgatgctgactctggagctcagcacagccctggagcaccaggngtacattacttttcttgaagacctcaagagttttgtcaagagccagtagagcagacagatgctgaaagccatagtttcatggcaggctttggccagtgaacaaatcctactctgaagctagacatgtgctttgaaatgattatcatcctaatatcatgggggaaaaaataccagatttaaattatatgttttgtgctctcatttatttatcatttttttctgtacaaatctattatttctaggtttttgtattacatgatagacataaattgggttatctcctccaggcagtttgtcttttcnantnctcccccttcaaccgtgtcacaaagaccagacngtgtcgggaaagttttttttctccgtattgttaaaggttccatncaattaggtttaataaaggcttnttntccag

SEQ ID NO: 805 - DNA, 753 bp, Homo sapiens
  misc_feature (1): n equals a,t,g, or c
  misc_feature (648): n equals a,t,g, or c
  misc_feature (668): n equals a,t,g, or c
  misc_feature (718): n equals a,t,g, or c
  misc_feature (736): n equals a,t,g, or c
ncaaacccactccaccttactaccagacaaccttagccaaaccatttacccaaataaagtataggcgatagaaattgaaacctggcgcaatagatatagtaccgcaagggaaagatgaaaaattataaccaagcataatatagcaaggactaacccctataccttctgcataatgaattaactagaaataactttgcaaggagagccaaagctaagacccccgaaaccagacgagctacctaagaacagctaaaagagcacacccgtctatgtagcaaaatagtgggaagatttataggtagaggcgacaaacctaccgagcctggtgatagctggttgtccaagatagaatcttagttcaactttaaatttgcccacagaaccctctaaatccccttgtaaatttaactgttagtccaaagaggaacagctctttggacactaggaaaaaaccttgtagagagagtaaaaaatttaacacccatagtaggcctaaaagcagccaccaattaagaaagcgttcaagctcaacacccactacctaaaaaatcccaaacatataactgaactcctcacacccaattggaccaatctatcaccctatagaagaactaatggtagtataagtaacatgaaaacattctcctncgcataagcctgcgtcagantaaaacctgactgacaattaacagcccaattctacaatcaaacaacaagncattattacccttactgncaacccaaccaggcatg

SEQ ID NO: 806 - DNA, 404 bp, Homo sapiens
  misc_feature (11): n equals a,t,g, or c
  misc_feature (352): n equals a,t,g, or c
  misc_feature (383): n equals a,t,g, or c
  misc_feature (396): n equals a,t,g, or c
  misc_feature (398): n equals a,t,g, or c
  misc_feature (403): n equals a,t,g, or c
ggaagaaggangaaaagcaggaagctggaaaggaaggtactgcaccatctgaaaatggtgaaactaaagctgaagaggtactttccataaatacctcccactgattgaatcagtgtctttaaagaaatttctcaatccttcagccggtgatagcacgttcttaatgtctctttttattgcctgtaatgttattgcagatccacatctctcgctcaactgttaatgtctcaacctccagaggcaccccacccagcacactgtcagtaaaggggcagaatgaaacagtgagagttaagggtacaggaagaaaatttgcatgtttgcaagtgactagaatcagatagtaagtggnggtgggtttttttttttaatcattatgaaanagtgggaagcttngnaggtna

SEQ ID NO: 807 - DNA, 428 bp, Homo sapiens
  misc_feature (2): n equals a,t,g, or c
  misc_feature (17): n equals a,t,g, or c
  misc_feature (20): n equals a,t,g, or c
  misc_feature (33): n equals a,t,g, or c
  misc_feature (89): n equals a,t,g, or c
  misc_feature (164): n equals a,t,g, or c
  misc_feature (198): n equals a,t,g, or c
  misc_feature (215): n equals a,t,g, or c
  misc_feature (258): n equals a,t,g, or c
  misc_feature (266): n equals a,t,g, or c
  misc_feature (283): n equals a,t,g, or c
  misc_feature (400): n equals a,t,g, or c
  misc_feature (413): n equals a,t,g, or c
  misc_feature (417): n equals a,t,g, or c
  misc_feature (423): n equals a,t,g, or c
  misc_feature (426): n equals a,t,g, or c
cngttcctccgcctgtnccntgggggggccctnagagggaaggagaggtttctcacaccaaggcagatgctcctctggtgggagggtgntggcccggcaagattgaaggatgtgcagggcttcctctcagagccgcccaaactgccttgatgtgtggaggggangcaagatgggtaagggctcaggaagttgctccangaacagtagctgatganctgcccagagtgcctggctccagcctgtacccttggtatgccntgaacatntggtttccccacccaantgcggctaagtctctttttccttggatcagccaggcgaaattggggctttgacaaggaattttctaaggaaaccttgttaaccagacaaaacacaaccagggttacagggggtatgnaagggttttctgncccnggaggnttnag

SEQ ID NO: 808 - DNA, 403 bp, Homo sapiens
  misc_feature (2): n equals a,t,g, or c
  misc_feature (34): n equals a,t,g, or c
  misc_feature (62): n equals a,t,g, or c
  misc_feature (85): n equals a,t,g, or c
  misc_feature (257): n equals a,t,g, or c
  misc_feature (258): n equals a,t,g, or c
  misc_feature (261): n equals a,t,g, or c
  misc_feature (265): n equals a,t,g, or c
  misc_feature (270): n equals a,t,g, or c
  misc_feature (286): n equals a,t,g, or c
  misc_feature (288): n equals a,t,g, or c
  misc_feature (342): n equals a,t,g, or c
  misc_feature (346): n equals a,t,g, or c
  misc_feature (349): n equals a,t,g, or c
  misc_feature (365): n equals a,t,g, or c
  misc_feature (375): n equals a,t,g, or c
cnagccccgaggggctctcgcttctggcgccaangcccggccgcgcgccggccgggccgacnccgctccggggacagtgccaggnggggagtttgactggggcggtacacctgtcaaacggtaacgcaggtgtcctaaggcgagctcagggaggacagaaacctcccgtggagcagaagggcaaaagctcgcttgatcttcattttcagtacgaatacagaccgtgaaagccgggcctcacgatcctcctgaccttnncgntttncagcnggaggtgtcagaaaantnaccacagggataactcgcttgtcgcggccaagcgttcatagcgacgtcgctttnccangtncgatgtcggatcttcntatcattgtnaagcagaattcaccaagcgttggattgt

SEQ ID NO: 809 - DNA, 583 bp, Homo sapiens
  misc_feature (376): n equals a,t,g, or c
  misc_feature (377): n equals a,t,g, or c
  misc_feature (421): n equals a,t,g, or c
  misc_feature (423): n equals a,t,g, or c
  misc_feature (435): n equals a,t,g, or c
  misc_feature (440): n equals a,t,g, or c
  misc_feature (444): n equals a,t,g, or c
  misc_feature (472): n equals a,t,g, or c
  misc_feature (478): n equals a,t,g, or c
  misc_feature (481): n equals a,t,g, or c
  misc_feature (488): n equals a,t,g, or c
  misc_feature (565): n equals a,t,g, or c
  misc_feature (571): n equals a,t,g, or c
  misc_feature (573): n equals a,t,g, or c
  misc_feature (581): n equals a,t,g, or c
  misc_feature (583): n equals a,t,g, or c
tcgacccacgcgtccgggacgacagttagctatgctgatacccttctgtgaggagttgaatttgaagaccacttggctgtttcacaaaaccagaagtaattacagggtgttcctgaaaagccccatagtgattgagtcttcaaaaccaccgattctgagagcaaggaagattttggaagaaaatctgactgtggattatgacaaagattatcttttttcttaagtaatctatttagatcgggctgactgtacaaatgactcctggaaaaaactcttcacctagtctagaataagggaggtgggagaatgatgacttaccctgaagtccttcccttgactgcccgcactggggcctgttctgtgccctgggagcatnntgcccagctaagtggggttcaggcagtgggcagctttcccaatnantcgatttccatnccagngganttaaaaccagttggccaaatttccaagnccttgnaantaaggantccatttaccaacccgcggttttgtggtcagtgccccaagggggtaggttgaagggggcttaacaaacatggaagtngggggnanaagggatnan

SEQ ID NO: 810 - DNA, 272 bp, Homo sapiens
  misc_feature (33): n equals a,t,g, or c
  misc_feature (43): n equals a,t,g, or c
  misc_feature (123): n equals a,t,g, or c
  misc_feature (130): n equals a,t,g, or c
  misc_feature (163): n equals a,t,g, or c
  misc_feature (165): n equals a,t,g, or c
  misc_feature (167): n equals a,t,g, or c
  misc_feature (228): n equals a,t,g, or c
  misc_feature (259): n equals a,t,g, or c
  misc_feature (262): n equals a,t,g, or c
  misc_feature (265): n equals a,t,g, or c
  misc_feature (266): n equals a,t,g, or c
tttttttttttttttggacgttaaaggcatttnattccagcgncttctagagagcttagtgtatacagatgagggtgtccgctgctgctttccttcggaatccagtgcttccacagagattancctgtancttatatttgacattcttcactgtctgttgttnancnaccgtagctttttaccgttcacttccccttccaactatgtccagatgtgcaggctcctccnctctggactttctccaaaggcactgaccctnggnctnnactttg

SEQ ID NO: 811 - DNA, 300 bp, Homo sapiens
  misc_feature (8): n equals a,t,g, or c
  misc_feature (252): n equals a,t,g, or c
  misc_feature (259): n equals a,t,g, or c
  misc_feature (264): n equals a,t,g, or c
  misc_feature (276): n equals a,t,g, or c
  misc_feature (280): n equals a,t,g, or c
ggcagagnataaaatcttaaagcactcataatatggcatccttcaatttctgtataaaagcagatctttttaaaaagatacttctgtaacttaagaaacctgggcatttaaatcatattttgtctttaggtaaaagctttggtttgtgttcgtgttttgtttgtttcacttgtttccctcccagccccaaaccttttgttctctccgtgaacttacctttccctttttctttctcttttttttttttggaanattaatngtttncaataaaatttncatngccattaaaaaaaaaaaaaa

SEQ ID NO: 812 - DNA, 478 bp, Homo sapiens
  misc_feature (232): n equals a,t,g, or c
  misc_feature (294): n equals a,t,g, or c
  misc_feature (325): n equals a,t,g, or c
  misc_feature (336): n equals a,t,g, or c
  misc_feature (409): n equals a,t,g, or c
  misc_feature (427): n equals a,t,g, or c
  misc_feature (445): n equals a,t,g, or c
  misc_feature (460): n equals a,t,g, or c
  misc_feature (468): n equals a,t,g, or c
gccaccttactaccagacaaccttagccaaaccatttacccaaataaagtataggcgatagaaattgaaacctggcgcaatagatatagtaccgcaagggaaagatgaaaaattatagccaagcataatatagcaaggactaacccctataccttctgcataatgaattaactagaaataactttgcaaggagagccaaagctaagacccccgaaaccagacgagctacctnagaacagctgaaagagcacacccgtctatgtagcaaaatagtgggaagatttataggttgangcgacaaacctaccgagcctggtgatagctngttgttccaanattgaatccttagttccacttttaatttggccccaaaaaccccctaattccccttggttaattttaactgttngtcccaaaaaaggaaccngctctttgggacccttanggaaaaaaaccttgnttaaaaanaattaaaaaa

SEQ ID NO: 813 - DNA, 63 bp, Homo sapiens
  misc_feature (49): n equals a,t,g, or c
  misc_feature (50): n equals a,t,g, or c
  misc_feature (53): n equals a,t,g, or c
  misc_feature (57): n equals a,t,g, or c
  misc_feature (59): n equals a,t,g, or c
gccgcggtccttcagactgcccggagagcgcgctctgcctgccgcctgnntgnctgncnctga

SEQ ID NO: 814 - DNA, 73 bp, Homo sapiens
  misc_feature (4): n equals a,t,g, or c
  misc_feature (37): n equals a,t,g, or c
  misc_feature (38): n equals a,t,g, or c
  misc_feature (52): n equals a,t,g, or c
  misc_feature (58): n equals a,t,g, or c
ggcngacattcagactgagcgtgcctaccaaaagtanncgaccatctttcanaacaanaagagggtcctgctg

SEQ ID NO: 815 - DNA, 102 bp, Homo sapiens
  misc_feature (29): n equals a,t,g, or c
  misc_feature (91): n equals a,t,g, or c
  misc_feature (93): n equals a,t,g, or c
  misc_feature (100): n equals a,t,g, or c
  misc_feature (102): n equals a,t,g, or c
gctgccgcctgcctgcctgccactgaggnttcccagcaccatgagggcctggatcttctttctcctttgcctggccgggagggccttggcngnccctcancn

SEQ ID NO: 816 - DNA, 379 bp, Homo sapiens
  misc_feature (340): n equals a,t,g, or c
  misc_feature (348): n equals a,t,g, or c
  misc_feature (358): n equals a,t,g, or c
  misc_feature (359): n equals a,t,g, or c
  misc_feature (360): n equals a,t,g, or c
gctccacgagggttcagctgtctcttacttttaaccagtgaaattgacctgcccgtgaagaggcgggcataacacagcaagacgagaagaccctatggagctttaatttattaatgcaaacagtacctaacaaacccacaggtcctaaactaccaaacctgcattaaaaatttcggttggggcgacctcggagcagaacccaacctccgagcagtacatgctaagacttcaccagtcaaagcgaactactatactcaattgatccaataacttgaccaacggaacaagttaccctagggataacagcgcaatcctattctagagtccatatcaacaatanggtttacnacctcgatgnnnggatcaggacattccaatg

SEQ ID NO: 817 - DNA, 500 bp, Homo sapiens
  misc_feature (148): n equals a,t,g, or c
  misc_feature (158): n equals a,t,g, or c
  misc_feature (185): n equals a,t,g, or c
  misc_feature (192): n equals a,t,g, or c
  misc_feature (201): n equals a,t,g, or c
  misc_feature (215): n equals a,t,g, or c
  misc_feature (238): n equals a,t,g, or c
  misc_feature (240): n equals a,t,g, or c
  misc_feature (251): n equals a,t,g, or c
  misc_feature (259): n equals a,t,g, or c
  misc_feature (262): n equals a,t,g, or c
  misc_feature (283): n equals a,t,g, or c
  misc_feature (293): n equals a,t,g, or c
  misc_feature (336): n equals a,t,g, or c
  misc_feature (339): n equals a,t,g, or c
  misc_feature (345): n equals a,t,g, or c
  misc_feature (350): n equals a,t,g, or c
  misc_feature (354): n equals a,t,g, or c
  misc_feature (363): n equals a,t,g, or c
  misc_feature (365): n equals a,t,g, or c
  misc_feature (369): n equals a,t,g, or c
  misc_feature (373): n equals a,t,g, or c
  misc_feature (384): n equals a,t,g, or c
  misc_feature (394): n equals a,t,g, or c
  misc_feature (397): n equals a,t,g, or c
  misc_feature (416): n equals a,t,g, or c
  misc_feature (430): n equals a,t,g, or c
  misc_feature (445): n equals a,t,g, or c
  misc_feature (480): n equals a,t,g, or c
  misc_feature (484): n equals a,t,g, or c
tcgacccacgcgtccggccacagccacagccaggctagcctcgccggttcccgggtggcgcgcgttcgctgcctccttcagctccaggatgatcggccagaagacgctctactcctttttctcccccagccccgccaagaagcgacanggccccaagncccgagccggccgtcaaggggaccggngtggctngggttgctnaagaaagcggaatncggggggcatcccagccaagaangncccggctgggnaggagaanctngggaacgccggcctccttggncgctgaattnccgaacattttggaaccggattccagaggaacaaagggcccgnggnccttgnttaanaatncgggggccngnaaangttnccccttggggntttttggaanaanaacctgggaaagaaagcancttaaggggggggnattttcgggggaaancgttatttttaatcaaagctaaattggggattttntttncaaaaaggaaaggaaa

SEQ ID NO: 818 - DNA, 329 bp, Homo sapiens
  misc_feature (42): n equals a,t,g, or c
  misc_feature (45): n equals a,t,g, or c
  misc_feature (52): n equals a,t,g, or c
  misc_feature (77): n equals a,t,g, or c
  misc_feature (95): n equals a,t,g, or c
  misc_feature (104): n equals a,t,g, or c
  misc_feature (148): n equals a,t,g, or c
  misc_feature (159): n equals a,t,g, or c
  misc_feature (182): n equals a,t,g, or c
  misc_feature (183): n equals a,t,g, or c
  misc_feature (184): n equals a,t,g, or c
  misc_feature (193): n equals a,t,g, or c
  misc_feature (196): n equals a,t,g, or c
  misc_feature (208): n equals a,t,g, or c
  misc_feature (209): n equals a,t,g, or c
  misc_feature (239): n equals a,t,g, or c
  misc_feature (256): n equals a,t,g, or c
  misc_feature (275): n equals a,t,g, or c
  misc_feature (279): n equals a,t,g, or c
  misc_feature (320): n equals a,t,g, or c
cggtaccaatttacacaggagacagctatgaccatgattacnccnagctcgnaattaaccctcactaatgggaacanaagctggagctccaccgngtaggcggncggtctagaactagtgtgatcccccgggctgcaggaattcggcncgagaggaaanagaaaccgtctgaactatgctgnnngccatcatnctnggcctcatcgcnnttccatccctacgcatgctttacatagcanacgaggtgacgatgccncccttaccatcaagatcanttgnccaccaatggtacttgaacctacgagtacacccgaccaccnggtggacta

SEQ ID NO: 819 - DNA, 648 bp, Homo sapiens
  misc_feature (369): n equals a,t,g, or c
  misc_feature (518): n equals a,t,g, or c
  misc_feature (544): n equals a,t,g, or c
  misc_feature (547): n equals a,t,g, or c
  misc_feature (565): n equals a,t,g, or c
  misc_feature (584): n equals a,t,g, or c
  misc_feature (626): n equals a,t,g, or c
gcttaaattcttttgaggatgggatgtatttttcttgctgttcagtgctttttccttttcatctgttgttctgtggtcacagtgaccttagctacatagcagactttcccaaatgtattgattacaaataaacagttgttacttagcaagacctgaaaatatgtctgcaggtttctccttgaagcaaatgtgtgggatcattgcatttccagaaatctgcctccttcaccctccgttgacagtatatgtcatgcctcactttcttctagctgagctttaaatcattagagcttaaattgtcagatcgttcattgcctttccagggttatttagtaaagtttgttgaaaacaaaaacgccttttcttggntcttttttcagttattttgaaggccagcatcctgattaaatgctgacacattaatgaatgaccagcaacagctttcagctcttaaaaagacacttatatttgaatttacatgctgggtacctgggtccaatggtggcaaaaggccactnttcattaaaaggggtcctccatttcntanccccaaggacttcctcanttttcaaattgggaagggnacctaaaagggggtacaattaaaaccctggggtaaagggggnaaaaaaaaaaaaaaaaaaaaaa

SEQ ID NO: 820 - DNA, 469 bp, Homo sapiens
  misc_feature (238): n equals a,t,g, or c
  misc_feature (284): n equals a,t,g, or c
  misc_feature (293): n equals a,t,g, or c
  misc_feature (308): n equals a,t,g, or c
  misc_feature (319): n equals a,t,g, or c
  misc_feature (370): n equals a,t,g, or c
  misc_feature (396): n equals a,t,g, or c
  misc_feature (421): n equals a,t,g, or c
  misc_feature (428): n equals a,t,g, or c
  misc_feature (465): n equals a,t,g, or c
gccactccaccttactaccagacaaccttagccaaaccatttacccaaataaagtataggcgatagaaattgaaacctggcgcaatagatatagtaccgcaagggaaagatgaaaaattataaccaagcataatatagcaaggactaacccctataccttctgcataatgaattaactagaaataactttgcaaggagagccaaagctaaaacccccaataaaccttgaacagtgaanaaaaaaaaaaaaaaaaaaaaaaaaaaaaaaaaaaacctcgaggtcnacggtatcnataaccttgatatcnaattcggcacnagcaaccctcattccccaacccacgccggaggctgcgcctgcaggacctgnctgaccgattggtggatcctctgaanatgaacacgactcaccactgctcancgaggcntgcttgagcaaaatccgccaattataaaaaaaaaacnctcc

SEQ ID NO: 821 - DNA, 432 bp, Homo sapiens
  misc_feature (344): n equals a,t,g, or c
  misc_feature (385): n equals a,t,g, or c
  misc_feature (419): n equals a,t,g, or c
  misc_feature (422): n equals a,t,g, or c
  misc_feature (425): n equals a,t,g, or c
ggcacgagagaaactgtgtgtgaggggaagaggcctgtttcgctgtcgggtctctagttcttgcacgctctttaagagtctgcactggaggaactctgccattaccagctcccttgttgcagaaggaaggggaaacatacatttattcatgccagtctgttgcatgcaggctttttggcttcctaccttgcaacaaaataattgcaccaactccttagtgccgattccgcccacagagagtcctggagccacagtcttttttgctttgcattgtaaggagagggactaaagtgctagagactatgtcgctttcctgagctaacgagagcgctcgtgaactggantcaactgctttcagggaaaaagaaaaaaaaaaaaaaaaaanccgggggggggcccggtaacccatttccccctanagnggnggggttt

SEQ ID NO: 822 - DNA, 428 bp, Homo sapiens
  misc_feature (323): n equals a,t,g, or c
  misc_feature (367): n equals a,t,g, or c
  misc_feature (382): n equals a,t,g, or c
  misc_feature (385): n equals a,t,g, or c
  misc_feature (425): n equals a,t,g, or c
  misc_feature (427): n equals a,t,g, or c
aagtctcttcagtgcactcgctccctctctggctaaggcatgcattagccactacacaagtcattagtgaaagtggtcttttatgtcctcccagcagacagacatcaaggatgagttaaccaggagactactcctgtggactgtggagctctggaaggcttggtgggagtgaatttgcccacaccttacaattgtggcaggatccagaagagcctgtctttttatatccattccttggatgtcattgggcctctcccaccgatttcattacggtgccacgcatccatgggatctggggtagtccggaaaaacaaaaggagggnagacagcctggtaatggataagatccttaccacagttttcccanggggaataccttatnaanccttcaacttttttttttcccttaagaattaaaacggggnana

SEQ ID NO: 823 - DNA, 100 bp, Homo sapiens
  misc_feature (32): n equals a,t,g, or c
  misc_feature (54): n equals a,t,g, or c
  misc_feature (63): n equals a,t,g, or c
  misc_feature (71): n equals a,t,g, or c
  misc_feature (78): n equals a,t,g, or c
ctcagctcctgggggctcctgctactctgggntcccgagggtgccaaaatgtgncatccaagntgacccantctccgnccctccctgtctgcagctggta

SEQ ID NO: 824 - DNA, 173 bp, Homo sapiens
  misc_feature (79): n equals a,t,g, or c
  misc_feature (111): n equals a,t,g, or c
  misc_feature (117): n equals a,t,g, or c
  misc_feature (156): n equals a,t,g, or c
  misc_feature (165): n equals a,t,g, or c
cggacgcgtgggcggacgcgtgggcggacgcgtgggccgagaaccacaggtgtacaccctgcccccatcccgggagganatgaccaagaaacagtcagctgaactgcctgnttctanaggtttctatcccacgaaatccccttgaattgggaaacnattgggcanccgaaaaa

SEQ ID NO: 825 - DNA, 341 bp, Homo sapiens
  misc_feature (283): n equals a,t,g, or c
  misc_feature (313): n equals a,t,g, or c
  misc_feature (317): n equals a,t,g, or c
  misc_feature (335): n equals a,t,g, or c
  misc_feature (339): n equals a,t,g, or c
cccaaacccactccaccttactaccagacaaccttagccaaaccatttacccaaataaagtataggcgatagaaattgaaacctggcgcaatagatatagtaccgcaaggggaaagatgaaaaattataaccaagcataatatagcaaggactaacccctataccttctgcataatgaattaactagaaataactttgcaaggagagccaaagctaagacccccgaaaccagaacgagctaccttagaacagcttaaagagcacacccctctatttttgccanaatagtgggaaagatttataggttgaaggnaacnaacctaccgagcctggtnaatnct

SEQ ID NO: 826 - DNA, 492 bp, Homo sapiens
  misc_feature (337): n equals a,t,g, or c
  misc_feature (416): n equals a,t,g, or c
  misc_feature (446): n equals a,t,g, or c
  misc_feature (471): n equals a,t,g, or c
  misc_feature (475): n equals a,t,g, or c
  misc_feature (480): n equals a,t,g, or c
gcaaacccactccaccttactaccagacaaccttagccaaaccatttacccaaataaagtataggcgatagaaattgaaacctggcgcaatagatatagtaccgcaagggaaagatgaaaaattataaccaagcataatatagcaaggactaacccctataccttctgcataatgaattaactagaaataactttgcaaggagagccaaagctaagacccccgaaaccagacgagctacctaagaacagctaaaagagcacacccgtctatgtagcaaaatagtgggaagatttataggtagaggcgacaaacctaccgagcctggtgatagctggntgtccaagatagaatcttagttcaactttaaatttgcccacagaaccctctaaatccccttgtaaatttaactgttagnccaaagaggaacaagctctttggacactangaaaaaaccttgtatagagaggaanaaanatttnacaacccatact

SEQ ID NO: 827 - DNA, 290 bp, Homo sapiens
  misc_feature (59): n equals a,t,g, or c
  misc_feature (230): n equals a,t,g, or c
  misc_feature (250): n equals a,t,g, or c
  misc_feature (262): n equals a,t,g, or c
  misc_feature (264): n equals a,t,g, or c
  misc_feature (290): n equals a,t,g, or c
ggtcgtgctctcccgggccgggtccgagccgcgacgggcgaggggcggacgttcgtggngaacgggaccgtccttctcgctccgccccgcgggggtcccctcgtctctcctctccccgcccgccggcggtgcgtgtgggaaggcgtggggtgcggaccccggcccgacctcgccgtcccgcccgccgccttctgcgtcgcgggtgcgggccggcggggtcctctgacgcngcagacagccctcgctgtcncctccagtggangncgacttgcgggcggtactcctacgan

SEQ ID NO: 828 - DNA, 420 bp, Homo sapiens
  misc_feature (149): n equals a,t,g, or c
  misc_feature (334): n equals a,t,g, or c
  misc_feature (382): n equals a,t,g, or c
  misc_feature (396): n equals a,t,g, or c
  misc_feature (403): n equals a,t,g, or c
  misc_feature (405): n equals a,t,g, or c
gggtcgacccacgcgtccggcagcacggaaaaagaaggtctcctccacgaagcgacactgagcgtgcaccaagggcttggtctgcgggggccttggagctcctgctcttctcccgcacctccatggatgcactgctgccgagcagagcngcctctgccaggccccgccctgggattcctagagactagcttcagttttgctattttttttaagtgggagaagggtgggcagttatcactggggaagagaggaccggccacctgtccagcatgggctccagagccttcctctctcacagggcagagtcttgtcggcaaggcagcctcctggccantttctctgctcatgtttctggttagcagagttcagagccaattgtttnacttcttggttgtncccgtgnangaagcctttcaaaac

SEQ ID NO: 829 - DNA, 298 bp, Homo sapiens
  misc_feature (19): n equals a,t,g, or c
  misc_feature (20): n equals a,t,g, or c
  misc_feature (30): n equals a,t,g, or c
  misc_feature (56): n equals a,t,g, or c
  misc_feature (57): n equals a,t,g, or c
  misc_feature (109): n equals a,t,g, or c
  misc_feature (125): n equals a,t,g, or c
  misc_feature (129): n equals a,t,g, or c
  misc_feature (171): n equals a,t,g, or c
  misc_feature (181): n equals a,t,g, or c
  misc_feature (191): n equals a,t,g, or c
  misc_feature (267): n equals a,t,g, or c
  misc_feature (268): n equals a,t,g, or c
  misc_feature (269): n equals a,t,g, or c
  misc_feature (281): n equals a,t,g, or c
  misc_feature (287): n equals a,t,g, or c
ttcagaaaaaacaatagtnntgtgcctctntcttctcaaacaatggatgacacaannctatggagagtgacaaaatggtgacaggtagctggggacctaggctatctcnccatgaaggttgttcngctnattgtatatctgtgtatgtagtgtaactatattgtacaatgngaagactgtnaactactatntagggttgttgcagattgaaatttagttgtctcattggctgtctgaggaagtgtggacttctatatatagatctannntgaaaactgctncatgantgaaaaccaca

SEQ ID NO: 830 - DNA, 516 bp, Homo sapiens
  misc_feature (1): n equals a,t,g, or c
  misc_feature (5): n equals a,t,g, or c
  misc_feature (10): n equals a,t,g, or c
  misc_feature (21): n equals a,t,g, or c
  misc_feature (35): n equals a,t,g, or c
  misc_feature (408): n equals a,t,g, or c
  misc_feature (475): n equals a,t,g, or c
  misc_feature (477): n equals a,t,g, or c
  misc_feature (497): n equals a,t,g, or c
  misc_feature (513): n equals a,t,g, or c
  misc_feature (515): n equals a,t,g, or c
ncggnaactnctcactatagntgaaagctggtacncctgcaggtaccggtccggaattcccgggggcatccccttgtccccaagagacccgacgcttgcttcatggcctacacgttcgagagagagtcttcgggagaggaggaggagtagggccgcctcggggctgggcatccggcccctggggccaccccttgtcagccgggtgggtaggaaccgtagactcgctcatctcgcctgggtttgtccgcatgttgtaatcgtgcaaataaacgctcactccgaattagcggtgtatttcttgaagtttaatattgtgtttgtgatactgaagtatttgctttaattctaaataaaaatttatattttacttttttattgctggtttaagatgattcagattatccttgnactttgaggagaagtttcttatttggagcttttggaaacagcttaagcttttaacttggaaagatangnattaatccccttcattggtntccaaaagccaataangng

SEQ ID NO: 831 - DNA, 636 bp, Homo sapiens
  misc_feature (414): n equals a,t,g, or c
  misc_feature (453): n equals a,t,g, or c
  misc_feature (530): n equals a,t,g, or c
  misc_feature (617): n equals a,t,g, or c
ggaaaaaaatgagttccatttaaaattttggcatatggcattttctaacttaggaagccacaatgttcttggcccatcatgacattgggtagcattaactgtaagttttgtgcttccaaatcactttttggtttttaagaatttcttgatactcttatagcctgccttcaattttgatcctttattctttctatttgtcaggtgcacaagattaccttcctgttttagccttctgtcttgtcaccaaccattcttacttggtggccatgtacttggaaaaaggccgcatgatctttctggctccactcagtgtctaaggcaccctgcttcctttgcttgcatcccacagactatttccctcatcctatttactgcagcaaatctctccttagttgatgagactgtgtttatctncctttaaaaccctacctatcctgaatggtctgtcattgnctgcctttaaaatccttcctctttcttcctcctctattctctaaataatgatggggcttaagttatacccaaagctnactttacaaaatatttcctcaagactttgcagaaacaccaacaaaatgccatttaaaaaaggggattttctttaaaggaactctaanacaggcaaggttctgatgt

SEQ ID NO: 832 - DNA, 466 bp, Homo sapiens
  misc_feature (421): n equals a,t,g, or c
  misc_feature (443): n equals a,t,g, or c
  misc_feature (446): n equals a,t,g, or c
  misc_feature (453): n equals a,t,g, or c
  misc_feature (466): n equals a,t,g, or c
gatcagattatgagttactgtttaaaagaaaaatgctgtttattcatgctgaggtgattcagttccctccttcttacagaagtattttaattcaccccacactagaaatgcagcatctttgtggacgtctttttcacaagcctccaaggctccttagattgggtcgttactaaaagtacattaaaacactcttgtttatcgaagtatattgatgtattctaaagctagtaaacttccctaacgtttaattgccctacagatgcttctcttgctgtgggttttcttttgttagtggtctgaaataattattttcctgttctattaatacataagtgtattttgcacaaaaaaattaacctggtcaaatagtgattaccaaaatatatattaataatcttgggcaaatttttgccatttatangaaaacatttttaacccacggntangttctanatttattctttcn

SEQ ID NO: 833 - DNA, 405 bp, Homo sapiens
  misc_feature (237): n equals a,t,g, or c
  misc_feature (278): n equals a,t,g, or c
  misc_feature (335): n equals a,t,g, or c
ttttaattcaacccagccatgcaatgccaaataatagaattgctccctaccagctgaacagggaggagtctgtgcagtttctgacacttgttgttgaacatggctaaatacaatgggtatcgctgagactaagttgtaaaaaattaacaaatgtgctgcttggttaaaatggctacactcatctgactcattctttattctattttagttggtttgtatcttgcctaaggtgcgtantccaactcttggtattaccctcctaatagtcatactagtantcatactccctggtgttatgtattctctaaaagctttaaatgtctgcattgcaaccngccatcaaatattgaatgggctctcttttggctggaattacaaactcaaaaaatgtttctcaggaaaaaa

SEQ ID NO: 834 - DNA, 402 bp, Homo sapiens
  misc_feature (277): n equals a,t,g, or c
  misc_feature (332): n equals a,t,g, or c
  misc_feature (354): n equals a,t,g, or c
  misc_feature (359): n equals a,t,g, or c
  misc_feature (390): n equals a,t,g, or c
  misc_feature (400): n equals a,t,g, or c
gcaaacccacaggtcctaaactaccaaacctgcattaaaaatttcggttggggcgacctcggagcagaacccaacctccgagcagtacatgctaagacttcaccagtcaaagcgaactactatactcaattgatccaataacttgaccaacggaacaagttaccctagggataacagcgcaatcctattctagagtccatatcaacaatagggtttacgacctcgatgttggatcaggacatcccgatggtgcagccgctattaaaggttcgtttgntcaacgattaaagtcctacgtgatctgagttcagaccggagtaatccaggtcggnttctatctacttcaaattcctncctgnacgaaaggacaagagaaataagggctacttnacaaagcgcntt

SEQ ID NO: 835 - DNA, 121 bp, Homo sapiens
  misc_feature (1): n equals a,t,g, or c
  misc_feature (4): n equals a,t,g, or c
  misc_feature (40): n equals a,t,g, or c
  misc_feature (77): n equals a,t,g, or c
  misc_feature (100): n equals a,t,g, or c
  misc_feature (110): n equals a,t,g, or c
  misc_feature (117): n equals a,t,g, or c
nttnaaaaaaaaaaaaaaaaaaaaaaaaaaaagaaaaaanaaaaaaaaaaaaaaaaaaaaaaaaagggcggccgttntaaaggatccaagcttacgtacncgtgcatgcnacgtcanagct

SEQ ID NO: 836 - DNA, 411 bp, Homo sapiens
  misc_feature (340): n equals a,t,g, or c
  misc_feature (344): n equals a,t,g, or c
  misc_feature (357): n equals a,t,g, or c
  misc_feature (386): n equals a,t,g, or c
  misc_feature (408): n equals a,t,g, or c
agtaagcctgccagacacgctgtggcggctgcctgaagctagtgagtcgcggcgccgcgcacttgtggttgggtcagtgccgcgcgccgctcggtcgttaccgcgaggcgctggtggccttcaggctggacggcgcgggtcagccctggtttgccggcttctgggtctttgaacagccgcgatgtcgatcttcacccccaccaaccagatccgcctaaccaatgtggccgtggtacggatgaagcgcgccaggaagcgcttcgaaatcgcttgctacagaaacaagtcgtcggctggcggagggctttggaaaaagacttgatgaattttgcagacccancaangtttgtaaagttnccaaagtcagtttccaaaaggaaattcancaggggtttggaaaatgccaangaa

SEQ ID NO: 837 - DNA, 386 bp, Homo sapiens
  misc_feature (381): n equals a,t,g, or c
  misc_feature (383): n equals a,t,g, or c
  misc_feature (384): n equals a,t,g, or c
  misc_feature (385): n equals a,t,g, or c
  misc_feature (386): n equals a,t,g, or c
gcggcagctcagcaagtggtggaccaggccacagaggcggggcagaaagccatggaccagctggccaagaccacccaggaaaccatcgacaagactgctaaccaggcctctgacaccttctctgggatcgggaaaaaattcggcctcctgaaatgacagcagggagacttgggtcggcctcctgaaatgatagcagggagacttgggtgaccccccttccaggcgccatctagcacagcctggccctgatctccgggcagccaccacctcctcggtctgccccctcattaaaattcacgttcccaaaaaaaaaaaaaaaaaaaaaaaaaaaaaaaaaaaaaaaaaaaaaaaaaaaaaaaaaaaaaaaaaaaaaaaaaaaangnnnn

SEQ ID NO: 838 - DNA, 124 bp, Homo sapiens
gctttcaatagatcgcagcgagggagctgctctgctacgtacgaaaccccgacccagaagcaggtcgtctacgaatggtttagcgccaggttccccacgaacgtgcggtgcgtgacgggcgagg

SEQ ID NO: 839 - DNA, 270 bp, Homo sapiens
  misc_feature (26): n equals a,t,g, or c
  misc_feature (56): n equals a,t,g, or c
  misc_feature (107): n equals a,t,g, or c
  misc_feature (130): n equals a,t,g, or c
  misc_feature (175): n equals a,t,g, or c
  misc_feature (178): n equals a,t,g, or c
  misc_feature (250): n equals a,t,g, or c
  misc_feature (260): n equals a,t,g, or c
  misc_feature (261): n equals a,t,g, or c
atctggttgtggttacaatgaaaatnagaagcattattgatggattcgcataagcncaatgtgatgtcctgcgccgttctgccccctctcccttccagggtgagggnctggggtgagggttaatgttcgnaccagtgctggctgttcccctcaccctaaccctctccccaaaggncgnaggggcccggttacccaattcgccctatagtgagtcgtattacaattcactggccgtcgttttacaagacgnagggaggagnntgatgaaaa

SEQ ID NO: 840 - DNA, 430 bp, Homo sapiens
  misc_feature (210): n equals a,t,g, or c
  misc_feature (262): n equals a,t,g, or c
  misc_feature (263): n equals a,t,g, or c
  misc_feature (348): n equals a,t,g, or c
  misc_feature (369): n equals a,t,g, or c
  misc_feature (390): n equals a,t,g, or c
  misc_feature (395): n equals a,t,g, or c
  misc_feature (409): n equals a,t,g, or c
ctctacatcaccgccccgaccttagctctcaccatcgctcttctactatgaacccccctccccatacccaaccccctggtcaacctcaacctaggcctcctatttattctagccacctctagcctagccgtttactcaatcctctgatcagggtgagcatcaaactcaaactacgccctgatcggcgcactgcgagcagtagcccaaacnatctcatatgaagtcaccctagccatcattcctactatcaacattactaatnngttggctcctttaacctctccacccttatcacaacacaagaacactcctgaatatcctgccatcataaccctttggccatatatnattatcttccacactaggganaacaacgaacccccttcgaancttgngaaagggaatttcnaataatcttcaggttcaaatt

SEQ ID NO: 841 - DNA, 650 bp, Homo sapiens
  misc_feature (519): n equals a,t,g, or c
  misc_feature (555): n equals a,t,g, or c
  misc_feature (564): n equals a,t,g, or c
  misc_feature (573): n equals a,t,g, or c
  misc_feature (589): n equals a,t,g, or c
  misc_feature (634): n equals a,t,g, or c
gccgtcatctactctaccatctttgcaggcacactcatcacagcgctaagctcgcactgattttttacctgagtaggcctagaaataaacatgctagcttttattccagttctaaccaaaaaaataaaccctcgttccacagaagctgccatcaagtatttcctcacgcaagcaaccgcatccataatccttctaatagctatcctcttcaacaatatactctccggacaatgaaccataaccaataataccaatcaatactcatcattaataatcataatggctatagcaataaaactaggaatagccccctttcacttctgagtcccagaggttacccaaggcacccctctgacatccggcctgcttcttctcacatgacaaaaactagcccccatctcaatcatataccaaatctctccctcactagacgtaagccttctcctcactctctcaatcttatccatcatagtaggcagttgagggtggattaaaccaaaacccagctacgcaaaatcntagcatacttcctcaattacccacataggatgaatnaatagcagnttctaccgnacaacccttacataancatttcttaaattaactaattatattaatcctaactactacggantctactactaacttaa

SEQ ID NO: 842 - DNA, 509 bp, Homo sapiens
  misc_feature (438): n equals a,t,g, or c
  misc_feature (455): n equals a,t,g, or c
  misc_feature (462): n equals a,t,g, or c
  misc_feature (468): n equals a,t,g, or c
  misc_feature (482): n equals a,t,g, or c
gcctgtgtctgctaaaaaagaaaagaaagtttcctgcatgttcattcctgatgggcgggtgtctgtctctgctcgaattgacagaaaaggattctgtgaaggtgatgagatttccatccatgctgactttgagaatacatgttcccgaattgtggtccccaaagctgccattgtggcccgccacacttaccttgccaatggccagaccaaggtgctgactcagaagttgtcatcagtcagaggcaatcatattatctcagggacatgcgcatcatggcgtggcaagagccttcgggttcagaagatcaggccttctatcctgggctgcaacatccttcgagttgaatattccttactgatctatgttagcgttcctggatccaagaaggtcatccttgacctgcccctggtaattggcagcagatcaggtctaagcancagaacatccagctggncagcccnaaccanctctgaagatgagntgggtagatctgaacatcctgataccc

SEQ ID NO: 843 - protein, 158 aa, Homo sapiens
KRDWVIPPISCPENEKGPFPKNLVQIKSNKDKEGKVFYSITGQGADTPPVGVFIIERETGWLKVTEPLDRERIATYTLFSHAVSSNGNAVEDPMEILITVTDQNDNKPEFTQEVFKGSVMEGALPGTSVMEVTATDADDGCGTPTMPPSLTPSSAQDP

SEQ ID NO: 844 - protein, 601 aa, Homo sapiens
  SITE (36): Xaa equals any of the naturally occurring L-amino acids
  SITE (64): Xaa equals any of the naturally occurring L-amino acids
  SITE (103): Xaa equals any of the naturally occurring L-amino acids
  SITE (106): Xaa equals any of the naturally occurring L-amino acids
  SITE (152): Xaa equals any of the naturally occurring L-amino acids
  SITE (358): Xaa equals any of the naturally occurring L-amino acids
  SITE (383): Xaa equals any of the naturally occurring L-amino acids
TELLKSAARHGTAESAPWPRGQGWQQWQQQWRRRWXSWRKDRARTRRQEELALSQEPKSSSRGXSPGASPASPTSQQFCCFRLDQVIHSNPAGIQQALAQLSXRQXSVTAPGGHPRHKPGPPQAPQGPSPRPPTRYEPQRVNSGLSSDPHFXEPGPMVRGVGGTPRDSAGVSPFPPKRRERPPRKPELLQEESLPPPHSSGFLGSKPEGPGPQAESRDTGTEALTPHIWNRLHTATSRKSYRPSSMEPWMEPLSPFEDVAGTEMSQSDSGVDLSGDSQVSSGPCSQRSSPDGGLKGAAEGPPKRPGGSSPLNAVPCEGPPGSEPPRRPPPAPHDGDRKELPREQPLPPGPIGTERSQXTDRGTEPGPIRPSHRPGPPVQFGTXDKDSDLRLVVGDSLKAEKELTASVTEAIPVSRDWELLPSAAASAEPQSKNLDSGHCVPEPSSSGQRLYPEVFYGSAGPSSSQISGGAMDSQLHPNSGGFRPGTPSLHPYRSQPLYLPPGPAPPSALLSGVALKGQFLDFSTMQATELGKLPAGGVLYPPPSFLYSPAFCPSPLPDTSLLQVRQDLPSPSDFYSTPLQPGGQSGFLPSGAPASRCFYPW

SEQ ID NO: 845 - protein, 67 aa, Homo sapiens [sequence omitted]

SEQ ID NO: 846 - protein, 146 aa, Homo sapiens
  SITE (16): Xaa equals any of the naturally occurring L-amino acids
SQGPDHPSSQLQPLNXSLSHLLVPCLSIMSLLNKPKSEMTPEELQKREEEEFNTGPLSVLTQSVKNNTQVLINCRNNKKLLGRVKAFDRHCNMVLENVKEMWTEVPKSGKGKKKSKPVNKDRYISKMFLRGDSVIVVLRNPLIAGK

SEQ ID NO: 847 - protein, 184 aa, Homo sapiens
  SITE (8): Xaa equals any of the naturally occurring L-amino acids
  SITE (179): Xaa equals any of the naturally occurring L-amino acids
ARMAADKXPAAGPRSRAAMAQWRKKKGLRKRRGAASQARGSNSEDGEFEIQAEDDARARKLGPGRPLPTFPTSECTSDVEPDTREMVRAQNKKKKKSGGFQSMGLSYPVFKGIMKKGYKVPTPIQRKTIPVILDGKDVVAMARTGSGKTACFLLPMFERLKTHSAQTGARASSSRRPEXWPCRP

SEQ ID NO: 848 - protein, 160 aa, Homo sapiens
  SITE (35): Xaa equals any of the naturally occurring L-amino acids
ARASSECARCAAAVRTCRRRHRHHAQLRRHLEDAXSENFDELLKALGVNAMLRKVAVAAASKPHVEIRQDGDQFYIKTSTTVRTTEINFKVGEGFEEETVDGRKCRSLATWENENKIHCTQTLLEGDGPKTYWTRELANDELILTFGADDVVCTRIYVRE

SEQ ID NO: 849 - protein, 75 aa, Homo sapiens
  SITE (15): Xaa equals any of the naturally occurring L-amino acids
  SITE (50): Xaa equals any of the naturally occurring L-amino acids
VQNVGYQSKHCGAVXYARLPCEMIQDQNKALDCSKTQNSSRAEGGRLIWXEGPKYKTDGLRLETRGLRWKAHVPR

SEQ ID NO: 850 - protein, 383 aa, Homo sapiens
  SITE (299): Xaa equals any of the naturally occurring L-amino acids
STHASAHASVANEVIKCKAAVAWEAGKPLSIEEIEVAPPKAHEVRIKIIATAVCHTDAYTLSGADPEGCFPVILGHEGAGIVESVGEGVTKLKAGDTVIPLYIPQCGECKFCLNPKTNLCQKIRVTQGKGLMPDGTSRFTCKGKTILHYMGTSTFSEYTVVADISVAKIDPLAPLDKVCLLGCGISTGYGAAVNTAKLEPGSVCAVFGLGGVGLAVIMGCKVAGASRIIGVDINKDKFARAKEFGATECINPQDFSKPIQEVLIEMTDGGVDYSFECIGNVKVMRAALEACHKGWGVTXVVGVAASGEEIATRPFQLVTGRTWKGTAFGGWKSVESVPKLVSEYMSKKIKVDEFVTHNLSFDEINKAFELMHSGKSIRTVVKI

SEQ ID NO: 851 - protein, 154 aa, Homo sapiens [sequence omitted]

SEQ ID NO: 852 - protein, 396 aa, Homo sapiens
DSRVDPRVRAIIAKTFKGRGITGVEDKESWHGKPLPKNMAEQIIQEIYSQIQSKKKILATPPQEDAPSVDIANIRMPSLPSYKVGDKIATRKAYGQALAKLGHASDRIIALDGDTKNSTFSEIFKKEHPDRFIECYIAEQNMVSIAVGCATRNRTVPFCSTFAAFFTRAFDQIRMAAISESNINLCGSHCGVSIGEDGPSQMALEDLAMFRSVPTSTVFYPSDGVATEKAVELAANTKGICFIRTSRPENAIIYNNNEDFQVGQAKVVLKSKDDQVTVIGAGVTLHEALAAAELLKKEKINIRVLDPFTIKPLDRKLILDSARATKGRILTVEDHYYEGGIGEAVSSAVVGEPGITVTHLAVNRVPRSGKPAELLKMFGIDRDAIAQAVRGLITKA

SEQ ID NO: 853 - protein, 302 aa, Homo sapiens
  SITE (228): Xaa equals any of the naturally occurring L-amino acids
SRLGLQSCGLSTQAITLSETAAALDCSLPRLHARQSMRVTLATIAWMVSFVSNYSHTANILPDIENEDFIKDCVRIHNKFRSEVKPTASDMLYMTWDPALAQIAKAWASNCQFSHNTRLKPPHKLHPNFTSLGENIWTGSVPIFSVSSAITNWYDEIQDYDFKTRICKKVCGHYTQVVWADSYKVGCAVQFCPKVSGFDALSNGAHFICNYGPGGNYPTWPYKRGATXSACPNNDKCLDNLCVNRQRDQVKRYYSVVYPGWPIYPRNRYTSLFLIVNSVILILSVIITILVQHKYPNLVLLD

SEQ ID NO: 854 - protein, 237 aa, Homo sapiens
  SITE (235): Xaa equals any of the naturally occurring L-amino acids
VPASFAAASAVLSAVFPQEPAYFLNMESVVRRCPFLSRVPQAFLQKAGKSLLFYAQNCPKMMEVGAKPAPRALSTAAVHYQQIKETPPASEKDKTAKAKVQQTPDGSQQSPDGTQLPSGHPLPATSQGTASKCPFLAAQMNQRGSSVFCKASLELQEDVQEMNAVRKEVAETSAGPSVVSVKTDGGDPSGLLKNFQDIMQKQRPERVSHLLQDNLPKSVSTFQYDRFFEKKIDEXKE

SEQ ID NO: 855 - protein, 272 aa, Homo sapiens
  SITE (202): Xaa equals any of the naturally occurring L-amino acids
TPGIFTEQSMITFLPLLLGLSLGCTGAGGFVAHVESTCLLDDAGTPKDFTYCISFNKDLLTCWDPEENKMAPCEFGVLNSLANVLSQHLNQKDTLMQRLRNGLQNCATHTQPFWGSLTNRTRPPSVQVAKTTPFNTREPVMLACYVWGFYPAEVTITWRKNGKLVMPHSSAHKTAQPNGDWTYQTLSHLALTPSYGDTYTCXVEHIGAPEPILRDWTPGLSPMQTLKVSVSAVTLGLGLIIFSLGVISWRRAGHSSYTPLPGSNYSEGWHIS

SEQ ID NO: 856 - protein, 153 aa, Homo sapiens
VVARFIRIYPLTWNGSLCMRLEVLGCSVAPVYSYYAQNEVVATDDLDFRHHSYKDMRQLMKVVNEECPTITRTYSLGKSSRGLKIYAMEISDNPGEHELGEPEFRYTAGIHGNEVLGRELLLLLMQYLCREYRDGNPRVRSWCRTHASTWCPH

SEQ ID NO: 857 - protein, 258 aa, Homo sapiens
CLSQKAVRAPRFLRGLPSGRVNCFLQAGHGASRSQGSGLCQMLKEGAKHFSGLEEAVYRNIQACKELAQTTRTAYGPNGMNKMVINHLEKLFVTNDAATILRELEVQHPAAKMIVMASHMQEQEVGDGTNFVLVFAGALLELAEELLRIGLSVSEVIEGYEIACRKAHEILPNLVCCSAKNLRDIDEVSSLLRTSIMSKQYGNEVFLAKLIAQACVSIFPDSGHFNVDNIRVCKILGSGISSSSVLHGMVFKKETEVM

SEQ ID NO: 858 - protein, 143 aa, Homo sapiens
  SITE (14): Xaa equals any of the naturally occurring L-amino acids
  SITE (135): Xaa equals any of the naturally occurring L-amino acids
PDSLPPPSPRLPAXGPEFPGRPTRPERSPSLGIPKCFHSVIRTEHRGLTMEFGLSWIFLAAILKGVQCEVQLVESGGGLVKPGGSLRLSCAASGFTFSNAWMSWVRQAPGKGLEWVGRIKSKTDGGTTDYAAPVXRQIHHLKR

SEQ ID NO: 859 - protein, 135 aa, Homo sapiens
  SITE (132): Xaa equals any of the naturally occurring L-amino acids
  SITE (133): Xaa equals any of the naturally occurring L-amino acids
VTMAQQAADKYLYVDKNFINNPLAQADWAAKKLVWVPSDKSGFEPASLKEEVGEEAIVELVENGKKVKVNKDDIQKMNPPKFSKVEDMAELTCLNEASVLHNLKERYYSGLIYVSGCRGTPQAGSEGSEVGXXAG

SEQ ID NO: 860 - protein, 52 aa, Homo sapiens
  SITE (2): Xaa equals any of the naturally occurring L-amino acids
AXLIKTRVLIYNKSNFSLSLGTSNCTPQITDTSEFFMVKKAPTLTYKCGPRN

SEQ ID NO: 861 - protein, 321 aa, Homo sapiens
  SITE (18): Xaa equals any of the naturally occurring L-amino acids
AHGVTSAPDNRPALGSTXPPVHNVTSASGSASGSASTLVHNGTSARATTTPASKSTPFSIPSHHSDTPTTLASHSTKTDASSTHHSTVPPLTSSNHSTSPQLSTGVSFFFLSFHISNLQFNSSLEDPSTDYYQELQRDISEMFLQIYKQGGFLGLSNIKFRPGSVVVQLTLAFREGTINVHDVETQFNQYKTEAASRYNLTISDVSVSDVPFPFSAQSGAGVPGWGIALLVLVCVLVALAIVYLIALAVCQCRRKNYGQLDIFPARDTYHPMSEYPTYHTHGRYVPPSSTDRSPYEKVSAGNGGSSLSYTNPAVAATSANL

SEQ ID NO: 862 - protein, 327 aa, Homo sapiens
  SITE (307): Xaa equals any of the naturally occurring L-amino acids
FGTSLTQVLLGAGENTKTNLESILSYPKDFTCVHQALKGFTTKGVTSVSQIFHSPDLAIRDTFVNASRTLYSSSPRVLSNNSDANLELINTWVAKNTNNKISRLLDSLPSDTRLVLLNAIYLSAKWKTTFDPKKTRMEPFHFKNSVIKVPMMNSKKYPVAHFIDQTLKAKVGQLQLSHNLSLVILVPQNLKHRLEDMEQALSPSVFKAIMEKLEMSKFQPTLLTLPRIKVTTSQDMLSIMEKLEFFDFSYDLNLCGLTEDPDLQVSAMQHQTVLELTETGVEAAAASAISVARTLLVFEVQQPFLFXLWDQQHKFPVFMGRVYDPRA

SEQ ID NO: 863 - protein, 86 aa, Homo sapiens
YYIVHLKLTERVNLKCSHHTNPKVTMFSPHKPKGNYVLISLIVVTISQCIHLPKHYVVYLEYIILFINYTSIKLKEGITNSHKIQI

SEQ ID NO: 864 - protein, 130 aa, Homo sapiens
LTQQQQPATGPQPSLGVSFGTPFGSGIGTGLQSSGLGSSNLGGFGTSSGFGCSTTGASTFGFGTTNKPSGSLSAGFGSSSTSGFNFSNPGITASAGLTFGVSNPASAGFGTGGQLLQLKKPPAGNKRGKR

SEQ ID NO: 865 - protein, 78 aa, Homo sapiens
SEWKIKGPSSPLASLPGRRHGGSSATGACGEAMAAAEGSSGPAGLTLGRSFSNYRPFEPQALGLSPSWRLTGFSGMKG

SEQ ID NO: 866 - protein, 529 aa, Homo sapiens
  SITE (8): Xaa equals any of the naturally occurring L-amino acids
  SITE (517): Xaa equals any of the naturally occurring L-amino acids
PPPEPRAXMAENPSLENHRIKSFKNKGRDVETMRRHRNEVTVELRKNKRDEHLLKKRNVPQEESLEDSDVDADFKAQNVTLEAILQNATSDNPVVQLSAVQAARKLLSSDRNPPIDDLIKSGILPILVKCLERDDNPSLQFEAAWALTNIASGTSAQTQAVVQSNAVPLFLRLLRSPHQNVCEQAVWALGNIIGDGPQCRDYVISLGVVKPLLSFISPSIPITFLRNVTWVIVNLCRNKDPPPPMETVQEILPALCVLIYHTDINILVDTVWALSYLTDGGNEQIQMVIDSGVVPFLVPLLSHQEVKVQTAALRAVGNIVTGTDEQTQVVLNCDVLSHFPNLLSHPKEKINKEAVWFLSNITAGNQQQVQAVIDAGLIPMIIHQLAKGDFGTQKEAAWAISNLTISGRKDQVEYLVQQNVIPPFCNLLSVKDSQVVQVVLDGLKNILIMAGDEASTIAEIIEECGGLEKIEVLQQHENEDIYKLAFEIIDQYFSGDDIDEDPCLIPEATQGGTYNFXPTANLQTKEFNF

SEQ ID NO: 867 - protein, 237 aa, Homo sapiens
RPGPVRRRGKVELIKFVRVQWRRPQVEWRRRRWGPGPGASMAGSEELGLREDTLRVLAAFLRRGEAAGSPVPTPPRSPAQEEPTDFLSRLRRCLPCSLGRGAAPSESPRPCSLPIRPCYGLEPGPATPDFYALVAQRLEQLVQEQLKSPPSPELQGPPSTEKEAILRRLVALLEEEAEVINQKLASDPALRTSWSACPPTLSPAWWSCSVAGMTALAQAEHAPGPRLLPRSPWPAWP

SEQ ID NO: 868 - protein, 196 aa, Homo sapiens
  SITE (6): Xaa equals any of the naturally occurring L-amino acids
  SITE (9): Xaa equals any of the naturally occurring L-amino acids
LSVSAXAAXVAAAAIHSDSAAAPGGGGAARDFFFFQTDRGAAADMSTPARRRLMRDFKRLQEDPPVGVSGAPSENNIMQWNAVIFGPEGTPFEDGTFKLVIEFSEEYPNKPPTVRFLSKMFHPNVYADGSICLDILQNRWSPTYDVSSILTSIQSLLDEPNPNSPANSQAAQLYQENKREYEKRVSAIVEQSWNDS

SEQ ID NO: 869 - protein, 544 aa, Homo sapiens
  SITE (7): Xaa equals any of the naturally occurring L-amino acids
  SITE (9): Xaa equals any of the naturally occurring L-amino acids
ADAWVAXAXASSGLVVARPTSAVPAEPRPFRPSPPHLAAMRLRRLALFPGVALLLAAARLAAASDVLELTDDNFESRISDTGSAGLMLVEFFAPWCGHCKRLAPEYEAAATRLKGIVPLAKVDCTANTNTCNKYGVSGYPTLKIFRDGEEAGAYDGPRTADGIVSHLKKQAGPASVPLRTEEEFKKFISDKDASIVGFFDDSFSEAHSEFLKAASNLRDNYRFAHTNVESLVNEYDDNGEGIILFRPSHLTNKFEDKTVAYTEQKMTSGKIKKFIQENIFGICPHMTEDNKDLIQGKDLLIAYYDVDYEKNAKGSNYWRNRVMMVAKKFLDAGHKLNFAVASRKTFSHELSDFGLESTAGEIPVVAIRTAKGEKFVMQEEFSRDGKALERFLQDYFDGNLKRYLKSEPIPESNDGPVKVVVAENFDEIVNNENKDVLIEFYAPWCGHCKNLEPKYKELGEKLSKDPNIVIAKMDATANDVPSPYEVRGFPTIYFSPANKKLNPKKYEGGRELSDFISYLQREATNPPVIQEEKPKKKKKAQEDL

SEQ ID NO: 870 - protein, 111 aa, Homo sapiens
  SITE (3): Xaa equals any of the naturally occurring L-amino acids
  SITE (17): Xaa equals any of the naturally occurring L-amino acids
RRXAIFTCEVPGVYYFXYHVHCKGGNVWVALFKNNEPVMYTYDEYKKGFLDQASGSAVLLLRPGDRCSSRCPQNRLQDCMPGSMSTPPFQDIYCIPCKNKKTKNKEKKEIL

SEQ ID NO: 871 - protein, 124 aa, Homo sapiens
GKTEVNYTQLVDLHARYAECGLRILAFPCNQFGKQEPGSNEEIKEFAAGYNVKFDMFSKICVNGDDAHPLWKWMKIQPKGKGILGNAIKWNFTKFLIDKNGCVVKRYGPMEEPLVIEKDLPHYF

SEQ ID NO: 872 - protein, 35 aa, Homo sapiens
SQHFGRPRQAEHLKEFKTSVANVVNPVSTKNTKIV

SEQ ID NO: 873 - protein, 420 aa, Homo sapiens
VCLQLCQSTVSCPLGYLASTATNDCGCTTTTCLPDKVCVHRSTIYPVGQFWEEGCDVCTCTDMEDAVMGLRVAQCSQKPCEDSCRSGFTYVLHEGECCGRCLPSACEVVTGSPRGDSQSSWKSVGSQWASPENPCLINECVRVKEEVFIQQRNVSCPQLEVPVCPSGFQLSCKTSACCPSCRCERMEACMLNGTVIGPGKTVMIDVCTTCRCMVQVGVISGFKLECRKTTCNPCPLGYKEENNTGECCGRCLPTACTIQLRGGQIMTLKRDETLQDGCDTHFCKVNERGEYFWEKRVTGCPPFDEHKCLAEGGKIMKIPGTCCDTCEEPECNDITARLQYVKVGSCKSEVEVDIHYCQGKCASKAMYSIDINDVQDQCSCCSPTRTEPMQVALHCTNGSVVYHEVLNAMECKCSPRKCSK

SEQ ID NO: 874 - protein, 151 aa, Homo sapiens
  SITE (90): Xaa equals any of the naturally occurring L-amino acids
  SITE (103): Xaa equals any of the naturally occurring L-amino acids
  SITE (143): Xaa equals any of the naturally occurring L-amino acids
RQVPHERAVRDGRGGGRSRGSKLTYACMRRHSSSIVSPKFNSLAVVLQRRDWENPGVTQLNRLAAHPPFASWRNSEEARTDSPFPNSCAXGMANGDAPCMGAXKRGGCGGYAQWTRYTCQRPSARSFRFLPFLSRHVRRLSPXSSKSVGSL

SEQ ID NO: 875 - protein, 95 aa, Homo sapiens
ALNLNSQLNIPKDTSQLKKHITLLCDRLSKGGRLCLSTDAAAPQTMVMPGGCTTIPESDLEERSVEQDSTELFTNHRHLTAETPRPVSPLQGVSE

SEQ ID NO: 876 - protein, 238 aa, Homo sapiens
  SITE (7): Xaa equals any of the naturally occurring L-amino acids
  SITE (10): Xaa equals any of the naturally occurring L-amino acids
  SITE (15): Xaa equals any of the naturally occurring L-amino acids
  SITE (20): Xaa equals any of the naturally occurring L-amino acids
TKKALEXSNXRFAAXFFRTXWNPPGAFKEFGTSLLRRRRGSGANMPVARSWVCRKTYVTPRRPFEKSRLDQELKLIGEYGLRNKREVWRVKFTLAKIRKAARELLTLDEKDPRRLFEGNALLRRLVRIGVLDEGKMKLDYILGLKIEDFLERRLQTQVFKLGLAKSIHHARVLIRQRHIRVRKQVVNIPSFIVRLDSQKHIDFSLRSPYGGGRPGRVKRKNAKKGQGGAGAGDDEEED

SEQ ID NO: 877 - protein, 79 aa, Homo sapiens
AGIRHEPSAAAMSSGASASALQRLVEQLKLEAGVERIKVSQAAAELQQYCMQNACKDALLVGVPAGSNPFREPRSCALL

SEQ ID NO: 878 - protein, 136 aa, Homo sapiens
IAIMNDTVTIRTRKFMTNRLLQRKQMVIDVLHPGKATVPKTEIREKLAKMYKTTPDVIFVFGFRTHFGGGKTTGFGMIYDSLDYAKKNEPKHRLARHGLYEKKKTSRKQRKERKNRMKKVRGTAKANVGAGKKPKE

SEQ ID NO: 879 - protein, 141 aa, Homo sapiens
GCVGVRPSLHPATSTASGSASPTLARAMASVSELACIYSALILHDDEVTVTEDKINALIKAAGVNVEPFWPGLFAKALANVNIGSLICNVGAGGPAPAAGAAPAGGPAPSTAAAPAEEKKVEAKKEESEESDDDMGFGLFD

SEQ ID NO: 880 - protein, 133 aa, Homo sapiens
  SITE (14): Xaa equals any of the naturally occurring L-amino acids
  SITE (19): Xaa equals any of the naturally occurring L-amino acids
  SITE (128): Xaa equals any of the naturally occurring L-amino acids
  SITE (130): Xaa equals any of the naturally occurring L-amino acids
  SITE (131): Xaa equals any of the naturally occurring L-amino acids
SAGAHAHGARELAXFLTPXPGAEAKEVEETIEGMLLRLEEFCSLADLIRSDTSQILEENIPVLKAKLTEMRGIYAKVDRLEAFVKMVGHHVAFLEADVLQAERDHGAFPQALRRWLGSAGSPPSGTSXLXXCP

SEQ ID NO: 881 - protein, 260 aa, Homo sapiens
  SITE (14): Xaa equals any of the naturally occurring L-amino acids
  SITE (124): Xaa equals any of the naturally occurring L-amino acids
  SITE (136): Xaa equals any of the naturally occurring L-amino acids
  SITE (171): Xaa equals any of the naturally occurring L-amino acids
IEEPRDTRLQVCSXVHIWCLDKFKMRKHRHLPLVAVFCLFLSGFPTTHAQQQQAVIEVNKRDIVFLVDGSSALGLANFNAIRDFIAKVIQRLEIGQDLIQVAVAQYADTVRPEFYFNTHPTKRXVITAVRKMKPLXGSALYTGSALDFVRNNLFTSSAGYRAAEGIPKLLXLITGGKSLDEISQPAQELKRSSIMAFAIGNKGADQAELEEIAFDSSLVFIPAEFRAAPLQGMLPGLLAPLRTLSGTPEVHSNKRDIIFL

SEQ ID NO: 882 - protein, 149 aa, Homo sapiens
  SITE (1): Xaa equals any of the naturally occurring L-amino acids
  SITE (2): Xaa equals any of the naturally occurring L-amino acids
  SITE (6): Xaa equals any of the naturally occurring L-amino acids
  SITE (9): Xaa equals any of the naturally occurring L-amino acids
  SITE (13): Xaa equals any of the naturally occurring L-amino acids
  SITE (16): Xaa equals any of the naturally occurring L-amino acids
  SITE (19): Xaa equals any of the naturally occurring L-amino acids
XXESEXSFXCRKXIIXFLXYKRVVFLKQLASGLLLVTGPLVLNRVPLRRTHQKFVIATSTKIDISNVKIPKHLTDAYFKKKKLRKPRHQEGEIFDTEKEKYEITEQRKIDQKAVDSQILPKIKAIPQLQGYLRSVFALTNGIYPHKLVF

SEQ ID NO: 883 - protein, 256 aa, Homo sapiens
WKSVVVLAVSAGAGSAHPRQNKYSVLLPTYNERENLPLIVWLLVKSFSESGINYEIIIIDDGSPDGTRDVAEQLEKIYGSDRILLRPREKKLGLGTAYIHGMKHATGNYIIIMDADLSHHPKFIPEFIRKQKEGNFDIVSGTRYKGNGGVYGWDLKRKIISRGANFLTQILLRPGASDLTGSFRLYRKEVLEKLIEKCVSKGYVFQMEMIVRARQLNYTIGEVPISFVDRVYGESKLGGNEIVSFLKGLLTLFATT

SEQ ID NO: 884 - protein, 449 aa, Homo sapiens
GGSWCRSSPGRDGSPGAKGDRGETGPAGPPGAPGAPGAPGPVGPAGKSGDRGETGPAGPAGPVGPVGARGPAGPQGPRGDKGETGEQGDRGIKGHRGFSGLQGPPGPPGSPGEQGPSGASGPAGPRGPPGSAGAPGKDGLNGLPGPIGPPGPRGRTGDAGPVGPPGPPGPPGPPGPPSAGFDFSFLPQPPQEKAHDGGRYYRADDANVVRDRDLEVDTTLKSLSQQIENIRSPEGSRKNPARTCRDLKMCHSDWKSGEYWIDPNQGCNLDAIKVFCNMETGETCVYPTQPSVAQKNWYISKNPKDKRHVWFGESMTDGFQFEYGGQGSDPADVAIQLTFLRLMSTEASQNITYHCKNSVAYMDQQTGNLKKALLLQGSNEIEIRAEGNSRFTYSVTVDGCTSHTGAWGKTVIEYKTTKTSRLPIIDVAPLDVGAPDQEFGFDVGPVCFL

SEQ ID NO: 885 - protein, 64 aa, Homo sapiens
GKLVTLQVPVRNSRVDPRVRWGFTKFNADEFEDMVAEKRLIPDGCGVKYIPSRGPLDKWRALHS

SEQ ID NO: 886 - protein, 132 aa, Homo sapiens
TTLRALALNLWPPKSRSLISSWQSCGQEVLKGKTHSDNCSPIYQPSAGVSDRGPLPPLECATYEECPMGKRRLSCPLAACASIPGQKFPQEPLALAQSHCERRWEPTPLGEGAVLLGTSQHQVRSLKLKNVN

SEQ ID NO: 887 - protein, 70 aa, Homo sapiens
GLSSEAREKSSEPQERSSEPWERSSEPWEGLVTFEDVAVEFTQEEWALLDPAQRTLYRDVMLENCRTWPH

SEQ ID NO: 888 - protein, 373 aa, Homo sapiens
VDPRVRFREEFLFSSLQEGRDKDTFSKMAMVSEFLKQAWFIENEEQEYVQTVKSSKGGPGSAVSPYPTFNPSSDVAALHKAIMVKGVDEATIIDILTKRNNAQRQQIKAAYLQETGKPLDETLKKALTGHLEEVVLALLKTPAQFDADELRAAMKGLGTDEDTLIEILASRTNKEIRDINRVYREELKRDLAKDITSDTSGDFRNALLSLAKGDRSEDFGVNEDLADSDARALYEAGERRKGTDVNVFNTILTTRSYPQLRRVFQKYTKYSKHDMNKVLDLELKGDIEKCLTAIVKCATSKPAFFAEKLHQAMKGVGTRHKALIRIMVSRSEIDMNDIKAFYQKMYGISLCQAILDETKGDYEKILVALCGGN

SEQ ID NO: 889 - protein, 336 aa, Homo sapiens
  SITE (7): Xaa equals any of the naturally occurring L-amino acids
  SITE (51): Xaa equals any of the naturally occurring L-amino acids
  SITE (60): Xaa equals any of the naturally occurring L-amino acids
  SITE (67): Xaa equals any of the naturally occurring L-amino acids
  SITE (100): Xaa equals any of the naturally occurring L-amino acids
  SITE (183): Xaa equals any of the naturally occurring L-amino acids
GRKKHLXARLVTEMDSKYQCVKLNDGHFMPVLGFGTYAPAEVPKSKALEAXKLAIEAGFXHIDSAHXYNNEEQVGLAIRSKIADGSVKREDIFYTSKLWXNSHRPELVRPALERSLKNLQLDYVDLYLIHFPVSVKPGEEVIPKDENGKILFDTVDLCATWEAVEKCKDAGLAKSIGVSNFNXRQLEMILNKPGLKYKPVCNQVECHPYFNQRKLLDFCKSKDIVLVAYSALGSHREEPWVDPNSPVLLEDPVLCALAKKHKRTPALIALRYQLQRGVVVLAKSYNEQRIRQNVQVFEFQLTSEEMKAIDGLNRNVRYLTLDIFAGPPNYPFSDEY

SEQ ID NO: 890 - protein, 195 aa, Homo sapiens
RSSEVYAQLCNVARIEAEREAGVHFRPGYEYGPGPDDLHYSIYGPDGAPFYNYLGPEDTVPEPAFPNTAGHSADRTPILESPLQPSELQPHYVASHPEPPAGFEGLQAEECGILNGCENGRCVRVREGYTCDCFEGFQLDAAHMACVDVNECDDLNGPAVLCVHGYCENTEGSYRCHCSPGYVAEAGPPHCTAKE

SEQ ID NO: 891 - protein, 198 aa, Homo sapiens
  SITE (108): Xaa equals any of the naturally occurring L-amino acids
  SITE (109): Xaa equals any of the naturally occurring L-amino acids
SAGLTGRIAFAAARPQTFVPGPSSPPPPPPPRPAELAPSPPADMSESKSGPEYASFFAVMGASAAMVFSALGAAYGTAKSGTGIAAMSVMRPEQIMKSIIPVVMAGIXXIYGLVVAVLIANSLNDDISLYKSFLQLGAGLSVGLSGLAAGFAIGIVGDAGVRGNAQQPRLFVGMILILIFAEVLGLYGLIVALILSTK

SEQ ID NO: 892 - protein, 95 aa, Homo sapiens
DAWAPSESREALLTPPPHRRHTAAASVMPKHEFSVDMTCGGCAEAVSRVLNKLGGVKYDIDLPNKKVCIESEHSMDTLLATLKKTGKTVSYLGLE

SEQ ID NO: 893 - protein, 123 aa, Homo sapiens
  SITE (111): Xaa equals any of the naturally occurring L-amino acids
  SITE (117): Xaa equals any of the naturally occurring L-amino acids
GEHPRQPAGNNILAVLTCCQQIHRTWMKFPFPLVSSCSTPLLDPKSLTKALNTVKMFYIPFHLCCFFNCILPDVLMLSLMLIVIPVRVHFIFMLFQPCINIHLTKITQLIXKKKKNXGGGPGT

SEQ ID NO: 894 - protein, 172 aa, Homo sapiens
QFVYCGKKAQLNIGNVLPVGTMPEGTIVCCLEEKPGDRGKLARASGNYATVISHNPETKKTRVKLPSGSKKVISSANRAVVGVVAGGGRIDKPILKAGRAYHKYKAKRNCWPRVRGVAMNPVEHPFGGGNHQHIGKPSTIRRDAPAGRKVGLIAARRTGRLRGTKTVQEKEN

SEQ ID NO: 895 - protein, 171 aa, Homo sapiens
  SITE (22): Xaa equals any of the naturally occurring L-amino acids
  SITE (37): Xaa equals any of the naturally occurring L-amino acids
NREGSKGVETRRVLVGEQQQCXDAKSQQKEQMLLLEXKSAAYSQVLLRCLTLLQRLLQEHRLKTQSELDRINAQYLEVKCGAMILKLRMEELKILSDTYTVEKVEVHRLIRDRLEGAIHLQEQDMENSRQVLNSYEVLGEEFDRLVKEYTVLKQATENKRWALQEFSKVYR

SEQ ID NO: 896 - protein, 99 aa, Homo sapiens
REVMKLYLFQWALFHFTTVPLFGSWSYTLIFSILLLNYQHKAIYLKDSVYPAIALKSSRKRNPLTCISFCRASLFSFVLCFLPFESDSVLVRKTSWDHS

SEQ ID NO: 897 - protein, 289 aa, Homo sapiens
  SITE (255): Xaa equals any of the naturally occurring L-amino acids
APEFPGRPTRPPTRRPRVRGRSQLSAHGPASFKMSTVHEILCKLSLEGDHSTPPSAYGSVKAYTNFDAERDALNIETAIKTKGVDEVTIVNILTNRSNAQRQDIAFAYQRRTKKELASALKSALSGHLETVILGLLKTPAQYDASELKASMKGLGTDEDSLIEIICSRTNQELQEINRVYKEMYKTDLEKDIISDTSGDFRKLMVALAKGRRAEDGSVIDYELIDQDARDLYDAGVKRKGTDVPKWISIMTERSXPTSRKYLIGTRVTALMTCWKASGKRLKETWKMLS

SEQ ID NO: 898 - protein, 232 aa, Homo sapiens
  SITE (205): Xaa equals any of the naturally occurring L-amino acids
NPRGKVAGFDLDGTLITTRSGKVFPTGPSDWRILYPEIPRKLRELEAEGYKLVIFTNQMSIGRGKLPAEEFKAKVEAVVEKLGVPFQVLVATHAGLYRKPVTGMWDHLQEQANDGTPISIGDSIFVGDAAGRPANWAPGRKKKDFSCADRLFALNLGLPFATPEEFFLKWPAAGFELPAFDPRTVSRSGPLCLPESRALLSATRXWLSQWDSLGPGSPPFSRSTSCRPDMST

SEQ ID NO: 899 - protein, 218 aa, Homo sapiens
LRVARPDAARAAPLAPAAAMKAVVQRVTRASVTVGGEQISAIGRGICVLLGISLEDTQKELEHMVRKILNLRVFEDESGKHWSKSVMDKQYEILCVSQFTLQCVLKGNKPDFHLAMPTEQAEGFYNSFLEQLRKTYRPELIKDGKFGAYMQVHIQNDGPVTIELESPAPGTATSDPKQLSKLEKQQQRKEKTRAKGPSEFKQGKKHSPKRRPQCQQRG

SEQ ID NO: 900 - protein, 152 aa, Homo sapiens
SKRGHVPWGLEEILDVIEPSQFVKIQEPLFKQIAKCVSSPHFQVAERALYYWNNEYIMSLIEENSNVILPIMFSSLYRISKEHWNPAIVALVYNVLKAFMEMNSTMFDELTATYKSDRQREKKKEKEREELWKKLEDLELKRGLRRDGIIPT

SEQ ID NO: 901 - protein, 261 aa, Homo sapiens
GLREISGRLAEMPADSGYPAYLGARLASFYERAGRVKCLGNPEREGSVSIVGAVSPPGGDFSDPVTSATLGIVQVFWGLDKKLAQRKHFPSVNWLISYSKYMRALDEYYDKHFTEFVPLRTKAKEILQEEEDLAEIVQLVGKASLAETDKITLEVAKLIKDDFLQQNGYTPYDRFCPFYKTVGMLSNMIAFYDMARRVFETTAQSDNKITWSIIREHMGDILYKLSSMKFKDPLKDGEAKIKSDYAQLLEDMQNAFRSLED

SEQ ID NO: 902 - protein, 169 aa, Homo sapiens
  SITE (33): Xaa equals any of the naturally occurring L-amino acids
FPGRPTRPRGISVSGGEAVCPVQWRLRKLAAAXGKGQEVETSVTYYRLEEVAKRNSLKELWLVIHGRVYDVTRFLNEHPGGEEVLLEQAGVDASESFEDVGHSSDAREMLKQYYIGDIHPSDLKPESGSKDPSKNDTCKSCWAYWILPIIGAVLLGFLYRYYTSESKSS

SEQ ID NO: 903 - protein, 53 aa, Homo sapiens
  SITE (15): Xaa equals any of the naturally occurring L-amino acids
  SITE (19): Xaa equals any of the naturally occurring L-amino acids
PLCLAKNKNFLILRXNIQXIHIKSLENIIPFDSLITLLEYKEMILNIYVVLWS

SEQ ID NO: 904 - protein, 329 aa, Homo sapiens
  SITE (3): Xaa equals any of the naturally occurring L-amino acids
  SITE (5): Xaa equals any of the naturally occurring L-amino acids
  SITE (36): Xaa equals any of the naturally occurring L-amino acids
RRXAXPRVRWKICGLSPTTTLAIYFEVVNQHNAPIXQGGRGAIQFVTQYQHSSGQRRIRVTTIARNWADAQTQIQNIAASFDQEAAAILMARLAIYRAETEEGPDVLRWLDRQLIRLCQKFGEYHKDDPSSFRFSETFSLYPQFMFHLRRSSFLQVFNNSPDESSYYRHHFMRQDLTQSLIMIQPILYAYSFSGPPEPVLLDSSSILADRILLMDTFFQILIYHGETIAQWRKSGYQDMPEYENFRHLLQAPVDDAQEILHSRFPMPRYIDTEHGGSQARFLLSKVNPSQTHNNMYAWGQESGAPILTDDVSLQVFMDHLKKLAVSSAA

SEQ ID NO: 905 - protein, 264 aa, Homo sapiens
  SITE (48): Xaa equals any of the naturally occurring L-amino acids
FLLPTLWFCSPSAKYFFKMAFYNGWILFLAVLAIPVCAVRGRNVENMXILRLMLLHIKYLYGIRVEVRGAHHFPPSQPYVVVSNHQSSLDLLGMMEVLPGRCVPIAKRELLWAGSAGLACWLAGVIFIDRKRTGDAISVMSEVAQTLLTQDVRVWVFPEGTRNHNGSMLPFKRGAFHLAVQAQVPIVPIVMSSYQDFYCKKERRFTSGQCQVRVLPPVPTEGLTPDDVPALADRVRHSMLTVFREISTDGRGGGDYLKKPGGGG

SEQ ID NO: 906 - protein, 189 aa, Homo sapiens
  SITE (1): Xaa equals any of the naturally occurring L-amino acids
  SITE (2): Xaa equals any of the naturally occurring L-amino acids
  SITE (4): Xaa equals any of the naturally occurring L-amino acids
XXPXPEFPGRTHASGLLRSRLALRWLSHVRRPSRRVPRMPRGSRSRTSRMAPPASRAPQMRAAPRPAPVAQPPAAAPPSAVGSSAAAPRQPGLMAQMATTAAGVAVGSAVGHTLGHAITGGFSGGSNAEPARPDITYQEPQGTQPAQQQQPCLYEIKQFLECAQNQGDIKLCEGFNEVLKQCRLANGLA

SEQ ID NO: 907 - protein, 638 aa, Homo sapiens
  SITE (43): Xaa equals any of the naturally occurring L-amino acids
  SITE (52): Xaa equals any of the naturally occurring L-amino acids
  SITE (56): Xaa equals any of the naturally occurring L-amino acids
  SITE (73): Xaa equals any of the naturally occurring L-amino acids
  SITE (427): Xaa equals any of the naturally occurring L-amino acids
YVQGYSLSQADVDAFRQLSAPPADPQLFHVARWFRHIEALLGXPCGKGQPCXLPSXQRPACAAPVVPSCWDPXCRLHLYNSLTRNKEVFIPQDGKKVTWYCCGPTVYDASHMGHARSYISFDILRRVLKDYFKFDVFYCMNITDIDDKIIKRARQNHLFEQYREKRPEAAQLLEDVQAALKPFSVKLNETTDPDKKQMLERIQHAVQLATEPLEKAVQSRLTGEEVNSCVEVLLEEAKDLLSDWLDSTLGCDVTDNSIFSKLPKFWEGDFHRDMEALNVLPPDVLTRVSEYVPEIVNFVQKIVDNGYGYVSNGSVYFDTAKFASSEKHSYGKLVPEAVGDQKALQEGEGDLSISADRLSEKRSPNDFALWKASKPGEPSWPCPWGKGRPGWHIECSAMAGTLLGASMDIHGGGFDLRFPHHDNELAXSEAYFENDCWVRYFLHTGHLTIAGCKMSKSLKNFITIKDALKKHSARQLRLAFLMHSWKDTLDYSSNTMESALQYEKFLNEFFLNVKDILRAPVDITGQFEKWGEEEAELNKNFYDKKTAIHKALCDNVDTRTVMEEMRALVSQCNLYMAARKAVRKRPNQALLENIALYLTHMLKIFGAVEEDSSLGFPVGGPGTSLSLEATVMPYLQVL

SEQ ID NO: 908 - protein, 248 aa, Homo sapiens
SHPLRSRLPSATGVGHALARSFCRHLGSAFPAQNARRSTETVPATEQELPQPQAETGSGTESDSDESVPELEEQDSTQATTQQAQLAAAAEIDEEPVSKAKQSRSEKKARKAMSKLGLRQVTGVTRVTIRKSKNILFVITKPDVYKSPASDTYIVFGEAKIEDLSQQAQLAAAEKFKVQGEAVSNIQENTQTPTVQEESEEEEVDETGVEVKDIELVMSQANVSRAKAVRALKNNSNDIVNAIMELTM

SEQ ID NO: 909 - protein, 161 aa, Homo sapiens
  SITE (46): Xaa equals any of the naturally occurring L-amino acids
  SITE (158): Xaa equals any of the naturally occurring L-amino acids
QGCCYGAGRRVARLLAPLMWRRAVSSVAGSAVGAEPGLRLLAVQRXPVEQRSAGLARPQTLSAACTAKPGLEERAEGTVNEGRPESDAADHTGPKFDIDMMVSLLRQENARDICVIQVPPEMRYTDYFVIVSGTSTRHLHAMAFYVVKMYKHLKCKRXPSC

SEQ ID NO: 910 - protein, 487 aa, Homo sapiens
KAASGPATSITGVTMGAVLGVFSLASWVPCLCSGASCLLCSCCPNSKNSTVTRLIYAFILLLSTVVSYIMQRKEMETYLKKIPGFCEGGFKIHEADINADKDCDVLVGYKAVYRISFAMAIFFFVFSLLMFKVKTSKDLRAAVHNGFWFFKIAALIGIMVGSFYIPGGYFSSVWFVVGMIGAALFILIQLVLLVDFAHSWNESWVNRMEEGNPRLWYAALLSFTSAFYILSIICVGLLYTYYTKPDGCTENKFFISINLILCVVASIISIHPKIQEHQPRSGLLQSSLITLYTMYLTWSAMSNEPDRSCNPNLMSFITRITAPTLAPGNSTAVVPTPTPPSKSGSLLDSDNFIGLFVFVLCLLYSSIRTSTNSQVDKLTLSGSDSVILGDTTTSGASDEEDGQPRRAVDNEKEGVQYSYSLFHLMLCLASLYIMMTLTSWYSPDAKFQSMTSKWPAVWVKISSSWVCLLLYVWTLVAPLVLTSRDFS

SEQ ID NO: 911 - protein, 98 aa, Homo sapiens
  SITE (69): Xaa equals any of the naturally occurring L-amino acids
DPRVRHRGNKVVKKKVLVRCRHFICPHSLRLSQSFQQRYVGPEHPEFTTSVVRRATMRRALGRICHFQXVRGTASLGEGALGCDSRTCKAASGLWRGR

SEQ ID NO: 912 - protein, 206 aa, Homo sapiens
FSLFPLAKSFDDGDYFPVWGTCLGFEELSLLISGECLLTATDTVDVAMPLNFTGGQLHSRMFQNFPTELLLSLAVEPLTANFHKWSLSVKNFTMNEKLKKFFNVLTTNTDGKIEFISTMEGYKYPVYGVQWHPEKAPYEWKNLDGISHAPNAVKTAFYLAEFFVNEARKNNHHFKSESEEEKALIYQFSPIYTGNISSFQQCYIFD

SEQ ID NO: 913 - protein, 91 aa, Homo sapiens
FSGPCPVNTLGWEVSSFSPLLSSCLNMVRTKADSVPGTYRKVVAARAPRKVLGSSTSATNSTSVSSRKEHVLCNLITQMMKKNRTFSFIFE

SEQ ID NO: 914 - protein, 178 aa, Homo sapiens
  SITE (132): Xaa equals any of the naturally occurring L-amino acids
  SITE (147): Xaa equals any of the naturally occurring L-amino acids
  SITE (154): Xaa equals any of the naturally occurring L-amino acids
RELSTRQRSQAKPPASMASEFKKKLFWRAVVAEFLATTLFVFISIGSALGFKYPVGNNQTAVQDNVKVSLAFGLSIATLAQSVGHISGAHLNPAVTLGLLLSCQISIFRALMYIIAQCVGAIVATAILSGIXSSLTGNSLGRNDLAXGVNFGPXPGHRDHRDPPAGAMRAGYYRPEAP

SEQ ID NO: 915 - protein, 377 aa, Homo sapiens
  SITE (355): Xaa equals any of the naturally occurring L-amino acids
VCAHGQGLLRYFYSRRIDITLSSVKCFHKLASAYGARQLQGYCASLFAILLPQDPSFQMPLDLYAYAVATGDALLEKLCLQFLAWNFEALTQAEAWPSVPTDLLQLLLPRSDLAVPSELALLKAVDTWSWGERASHEEVEGLVEKIRFPMMLPEELFELQFNLSLYWSHEALFQKKTLQALEFHTVPFQLLARYKGLNLTEDTYKPRIYTSPTWSAFVTDSSWSARKSQLVYQSRRGPLVKYSSDYFQAPSDYRYYPYQSFQTPQHPSFLFQDKRVSWSLVYLPTIQSCWNYGFSCSSDELPVLGLTKSGGSDRTIAYENKALMLCEGLFVADVTDFEGWKAAIPSALDTNSSKXTSSFPCPAGTSTASARSSAPST

SEQ ID NO: 916 - protein, 100 aa, Homo sapiens
RVQRDTCLPPMSLSFHLPSRRMKNPSIVGVLCTDSQGLNLGCRGTLSDEHAGVISVLAQQAAKLTSDPTDIPVVCLESDNGNIMIQKHDGITVAVHKMAS

SEQ ID NO: 917 - protein, 245 aa, Homo sapiens
  SITE (44): Xaa equals any of the naturally occurring L-amino acids
  SITE (64): Xaa equals any of the naturally occurring L-amino acids
  SITE (87): Xaa equals any of the naturally occurring L-amino acids
  SITE (172): Xaa equals any of the naturally occurring L-amino acids
  SITE (240): Xaa equals any of the naturally occurring L-amino acids
  SITE (242): Xaa equals any of the naturally occurring L-amino acids
LPPRSVGGLQKMRRKLGLVQVELEEDGALVSKLLETMHLTGADXTNTFYLLSSFPVELESPGLXEFLARLMEQCASLEELRLAFRPXMDPRQLSMMLMLAQSNPQLFALMGTRAGIARELERVEQQSRLEQLSAAELQSRNQGHWADWLQAYRARLDKDLEGAGDAAAWQAXARARDARQQPEVRAEELHSRRMPFEVAERGDFSEVRRVLKLFETLYHCEAGAATRRPRPREADGGGRXGXFLT

SEQ ID NO: 918 - protein, 44 aa, Homo sapiens
NSARRISLKEGEGKTDFLCGTKTKPSVSLCEQRCKKEETQFTHG

SEQ ID NO: 919 - protein, 160 aa, Homo sapiens
FGTRVTSGGSRDAVPGAEPPKMAVCIAVIAKENYPLYIRSTPTENELKFHYMVHTSLDVVDEKISAMGKALVDQRELYLGLLYPTEDYKVYGYVTNSKVKFVMVVDSSNTALRDNEIRSMFRKLHNSYTDVMCNPFYNPGDRIQSRAFDNMVTSMMIQVC

SEQ ID NO: 920 - protein, 40 aa, Homo sapiens
LAFFLTSEGEKKVATYMFEKPLKSTQSKDFMLQFGHMLRV

SEQ ID NO: 921 - protein, 372 aa, Homo sapiens
LLGPAGQRSHAAPMRPLPPVGDVRLELSPPPPLLPVPVVSGSPVGSSGRLMASSSSLVPDRLRLPLCFLGVFVCYFYYGILQEKITRGKYGEGAKQETFTFALTLVFIQCVINAVFAKILIQFFDTARVDRTRSWLYAACSISYLGAMVSSNSALQFVNYPTQVLGKSCKPIPVMLLGVTLLKKKYPLAKYLCVLLIVAGVALFMYKPKKVVGIEEHTVGYGELLLLLSLTLDGLTGVSQDHMRAHYQTGSNHMMLNINLWSTLLLGMGILFTGELWEFLSFAERYPAIIYNILLFGLTSALGQSFIFMTVVYFGPLTCSIITTTRKFFTILASVILFANPISPMQWVGTVLVFLGLGLDAKFGKGAKKTSH

SEQ ID NO: 922 - protein, 363 aa, Homo sapiens
PARTMFYAHFVLSKRGPLAKIWLAAHWDKKLTKAHVFECNLESSVESIISPKVKMALRTSGHLLLGVVRIYHRKAKYLLADCNEAFIKIKMAFRPGVVDLPEENREAAYNAITLPEEFHDFDQPLPDLDDIDVAQQFSLNQSRVEEITMREEVGNISILQENDFGDFGMDDREIMREGSAFEDDDMLVSTTTSNLLLESEQSTSNLNEKINHLEYEDQYKDDNFGEGNDGGILDDKLISNNDGGIFDDPPALSEAGVMLPEQPAHDDMDEDDNVSMGGPDSPDSVDPVEPMPTMTDQTTLVPNEEEAFALEPIDITVKETKAKRKRKLIVDSVKELDSKTIRAQLSDYSDIVTTLDLAPPPRN

SEQ ID NO: 923 - protein, 296 aa, Homo sapiens
VAVIWAYWLGLKVRREYRKFFRANAGKKIYEFTLQRIVQKYFLEMKNKMPSLSPIDKNWPSRPYLFLDSTHKELKRIFHLWRCKKYRDQFTDQQKLIYEEKLEASELFKDKKALYPSSVGQPFQGAYLEINKNPKYKKLKDAIEEKIIIAEVVNKINRANGKSTSRIFLLTNNNLLLADQKSGQIKSEVPLVDVTKVSMSSQNDGFFAVHLKEGSEAASKGDFLFSSDHLIEMATKLYRTTLSQTKQKLNIEISDEFLVQFRQDKVCVKFIQGNQKNGSVPTCKRKNNRLLEVAVP

SEQ ID NO: 924 - protein, 91 aa, Homo sapiens
HFSINYNQKSDLLKEKSDCKSFQGQTATEPPTPKQETLVKVQEARRFSPTKVQLGNDAERMTTTCNSRKMLASRVRVTSECHKSSLSHCLI

SEQ ID NO: 925 - protein, 159 aa, Homo sapiens
NSARAGGRAVLSGEPEANMDQETVGNVVLLAIVTLISVVQNGFFAHKVEHESRTQNGRSFQRTGTLAFERVYTANQNCVDAYPTFLAVLWSAGLLCSQVPAAFAGLMYLFVRQKYFVGYLGERTQSTPGYIFGETHHTLPVPHVRCWHIQLLPHLLFRK

SEQ ID NO: 926 - protein, 303 aa, Homo sapiens
GSLASPPSLGSMGEKSENCGVPEDLLNGLKVTDTQEAECAGPPVPDPKNQHSQSKLLRDDEAHLQEDQGEEECFHDCSASFEEEPGADKVENKSNEDVNSSELDEEYLIELEKNMSDEEKQKRREESTRLKEEGNEQFKKGDYIEAESSYSRALEMCPSCFQKERSILFSNRAAARMKQDKKEMAINDCSKAIQLNPSYIRAILRRAELYEKTDKLDEALEDYKSILEKDPSIHQAREACMRLPKQIEERNERLKEEMLGKLKDLGNLVLRPFGLSTENFQIKQDSSTGSYSINFVQNPNNNR

SEQ ID NO: 927 - protein, 329 aa, Homo sapiens
  SITE (1): Xaa equals any of the naturally occurring L-amino acids
XGGCCSGPGHSKRRRQAPGVGAVGGGSPEREEVGAGYNSEDEYEAAAARIEAMDPATVEQQEHWFEKALRDKKGFIIKQMKEDGACLFRAVADQVYGDQDMHEVVRKHCMDYLMKNADYFSNYVTEDFTTYINRKRKNNCHGNHIEMQAMAEMYNRPVEVYQYSTEPINTFHGIHQNEDEPIRVSYHRNIHYNSVVNPNKATIGVGLGLPSFKPGFAEQSLMKNAIKTSEESWIEQQMLEDKKRATDWEATNEAIEEQVARESYLQWLRDQEKQARQVRGPSQPRKASATCSSATAAASSGLEEWTSRSPRQEFQPRHLSTLSCMLNWA

SEQ ID NO: 928 - protein, 436 aa, Homo sapiens
  SITE (210): Xaa equals any of the naturally occurring L-amino acids
  SITE (217): Xaa equals any of the naturally occurring L-amino acids
  SITE (262): Xaa equals any of the naturally occurring L-amino acids
KRFLRNFKLLTKREFWKENQEHYHIVQKFLILGDIDGLMDEFSKWLSKSRNNLPGHLLRFMTHLILFFRTLGLQTKEEVSIEVLKTYIQLLIREKHTNLIAFYTCHLPQDLAVAQYALFLESVTEFEQRHHCLELAKEADLDVATITKTVVENIRKKDNGEFSHHDLAPALDTGTTEEDRLKIDVIDWLVFDPAQRAEALKQGNAIMRKXLASKKHXAAKEVFVKIPQDSIAEIYNQCEEQGMESPLPAEDDNAIREHLCIXAYLEAHETFNEWFKHMNSVPQKPALIPQPTFTEKVAHEHKEKKYEMDFGIWKGHLDALTADVKEKMYNVLLFVDGGWMVDVREDAKEDHERTHQMVLLRKLCLPMLCFLLHTILHSTGQYQECLQLADMVSSERHKLYLVFSKEELRKLLQKLRESSLMLLDQGLDPLGYEIQL

SEQ ID NO: 929 - protein, 161 aa, Homo sapiens
  SITE (159): Xaa equals any of the naturally occurring L-amino acids
DADVQFLASVLPPDTDPAFFEHLRALDCSEVTVRALPEGSLAFPGVPLLQVSGPLLVVQLLETPLLCLVSYASLVATNAARLRLIAGPEKRLLEMGLRRAQGPDGGLTASTYSYLGGFDSSSNVLAGQLRGVPVAGTLAHSFVTSFSGSEVPLTRCWGXSL

SEQ ID NO: 930 - protein, 741 aa, Homo sapiens
  SITE (8): Xaa equals any of the naturally occurring L-amino acids
  SITE (19): Xaa equals any of the naturally occurring L-amino acids
  SITE (282): Xaa equals any of the naturally occurring L-amino acids
LMKIEANXDHMGFHFTTGXPAPSTETELDVLLPTATSLPIPRKSATVIPEIEGIKAEAKALDDMFESSTLSDGQAIADQSEIIPTLGQFERTQEEYEDKKHAGPSFQPEFSSGAEEALVDHTPYLSIATTHLMDQSVTEVPDVMEGSNPPYYTDTTLAVSTFAKLSSQTPSSPLTIYSGSEASGHTEIPQPSALPGIDVGSSVMSPQDSFKEIHVNIEATFKPSSEEYLHITEPPSLSPDTKLEPSEDDGKPELLEEMEASPTELIAVEGTEILQDFQNKTXGQVSGEAIKMFPTIKTPEAGTVITTADEIELEGATQWPHSTSASATYGVEAGVVPWLSPQTSERPTLSSSPEINPETQAALIRGQDSTIAASEQQVAARILDSNDQATVNPVEFNTEVATPPFSLLETSNETDFLIGINEESVEGTAIYLPGPDRCKMNPCLNGGTCYPTETSYVCTCVPGYSGDQCELDFDECHSNPCRNGATCVDGFNTFRCLCLPSYVGALCEQDTETCDYGWHKFQGQCYKYFAHRRTWDAAERECRLQGAHLTSILSHEEQMFVNRVGHDYQWIGLNDKMFEHDFRWTDGSTLQYENWRPNQPDSFFSAGEDCVVIIWHENGQWNDVPCNYHLTYTCKKGTVACGQPPVVENAKTFGKMKPRYEINSLIRYHCKDGFIQRHLPTIRCLGNGRWAIPKITCMNPSAYQRTYSMKYFKNSSSAKDNSINTSKHDHRWSRRWQESRR

SEQ ID NO: 931 - protein, 209 aa, Homo sapiens
  SITE (28): Xaa equals any of the naturally occurring L-amino acids
GKAGDQLVPDNLKETDKEKGNVVLKGEXSARMKIPSNMWVEAWETAKPIPARRQRRLFDDTREAEKVLHYLAIQKPADLARHLLPCVIHAAVLKVKEEESLENISSVKKIIKQIISHSSKVLHFPNPEDKKLEEIIHQITNVEALIARARSLKAKFGTEKCEQEEEKEDLERFVSCLLEQPEVLVTGAGRGHAGRIIHKLFVNAQRCQL

SEQ ID NO: 932 - protein, 57 aa, Homo sapiens
LLEVPEMGLTFIKQIAYYDLAAATVQLHINSTDQTICIWHHLLTHDMRLFCINCYDG

SEQ ID NO: 933 - protein, 125 aa, Homo sapiens
IKEESDYHDLESVVQQVEQNLELMTKRAVKAENHVVKLKQEISLLQAQVSNFQRENEALRCGQGASLTVVKQNADVALQNLRVVMNSAQASIKQLVSGAETLNLVAEILKSIDRISEVKDEEEDS

SEQ ID NO: 934 - protein, 306 aa, Homo sapiens
PTFSRAVATMFSRAGVAGLSAWTLQPQWIQVRNMATLKDITRRLKSIKNIQKITKSMKMVAAAKYARAERELKPARIYGLGSLALYEKADIKGPEDKKKHLLIGVSSDRGLCGAIHSSIAKQMKSEVATLTAAGKEVMLVGIGDKIRGILYRTHSDQFLVAFKEVGRKPPTFGDASVIALELLNSGYEFDEGSIIFNKFRSVISYKTEEKPIFSLNTVASADSMSIYDDIDADVLQNYQEYNLANIIYYSLKESTTSEQSARMTAMDNASKNASEMIDKLTLTFNRTRQAVITKELIEIISGAAAL

SEQ ID NO: 935 - protein, 135 aa, Homo sapiens
GALCAASVPRCVWSSAGVVALFEEHCAPLVWVYTYECCHYMCSALLSLSCPCPAPSERAAGLCCRLVVPCHKGMPRLTDLSVKTKDVWEIPRESLQLIKRLGNGQFGEVWMGMLRLNYSLISFPVWKIPNTKDGR

SEQ ID NO: 936 - protein, 284 aa, Homo sapiens
LSGTTYARACRSQCASAAGGCTGGAGGGGGGGGGWGGAGGKCCDAVPGRGRRVEAEYQFPSGKAAMAIFSVYVVNKAGGLIYQLDSYAPRAEAEKTFSYPLDLLLKLHDERVLVAFGQRDGIRVGHAVLAINGMDVNGRYTADGKEVLEYLGNPANYPVSIRFGRPRLTSNEKLMLASMFHSLFAIGSQLSPEQGSSGIEMLETDTFKLHCYQTLTGIKFVVLADPRQAGIDSLLRKIYEIYSDFALKNPFYSLEMPIRCELFDQNLKLALEVAEKAGTFGPGS

SEQ ID NO: 937 - protein, 338 aa, Homo sapiens [sequence omitted]

SEQ ID NO: 938 - protein, 321 aa, Homo sapiens
  SITE (31): Xaa equals any of the naturally occurring L-amino acids
  SITE (164): Xaa equals any of the naturally occurring L-amino acids
  SITE (220): Xaa equals any of the naturally occurring L-amino acids
  SITE (221): Xaa equals any of the naturally occurring L-amino acids
  SITE (238): Xaa equals any of the naturally occurring L-amino acids
  SITE (263): Xaa equals any of the naturally occurring L-amino acids
  SITE (267): Xaa equals any of the naturally occurring L-amino acids
  SITE (268): Xaa equals any of the naturally occurring L-amino acids
CQEWVPDRESYVSHMKKSHGRTLKRYPCRQXEQSFHTPNSLRKHIRNNHDTVKKFYTCGYCTEDSPSFPRPSLLESHISLMHGIRNPDLSQTSKVKPPGGHSPQVNHLKRPVSGVGDAPGTSNGATVSSTKRHKSLFQCAKCSFATDSGLEFQSHIPQHQVGQXHSPMSPLWFVLHLCQLPQPPPLHCPQGERPGGGGGRGGGGTEMAVEVAEQRRAPGXXCPWRLERMDWKNVPVSXCQLTQRRGDCWARPLRTMVATMITXNHRXXRTRTATHCPLRCDRRLCSVHGQGWCRSVFHLPCGPWKIKGSAPSVSVTGCTLE

SEQ ID NO: 939 - protein, 151 aa, Homo sapiens
  SITE (4): Xaa equals any of the naturally occurring L-amino acids
  SITE (44): Xaa equals any of the naturally occurring L-amino acids
  SITE (67): Xaa equals any of the naturally occurring L-amino acids
  SITE (71): Xaa equals any of the naturally occurring L-amino acids
  SITE (81): Xaa equals any of the naturally occurring L-amino acids
  SITE (103): Xaa equals any of the naturally occurring L-amino acids
AASXGEQRERARLQTPTRPHSTSARPRRRQVQLLQLCGCAAKGXAHGLDVTSPTVSWLACPCARPSXSRQXLGTSEEEPGXNGKGGIGVHHSLLLWSSTGGTXMEVSCLTSLHCTGPGMPIHPLAEDTHQVICEETLGSHHLKARGSPSHR

SEQ ID NO: 940 - protein, 103 aa, Homo sapiens
  SITE (103): Xaa equals any of the naturally occurring L-amino acids
RCGWSSRSRRSRCARRCPPSPCPTPRHVPSSRHPEVCGLRTNSHRCLFRPQLQAMPAAGGVLYQPSGPASFPSTFSPAGSVEGSPMHGVYMSQPVPAAGPYPX

SEQ ID NO: 941 - protein, 136 aa, Homo sapiens
  SITE (123): Xaa equals any of the naturally occurring L-amino acids
TAGRSDVLPVAGGEVRALQEGGCGDKMKIFVGNVDGADTTPEELAALFAPYGTVMSCAVMKQFAFVHMRENAGALRAIEALHGHELRPGRALVVEMSRPRPLNTWKIFVGNVSAACTSQELRXSSSAADASSSVTW

SEQ ID NO: 942 - protein, 61 aa, Homo sapiens
IMKESSSVLAKCSSIAGYIQWSSINSYLSGLNQNCVSLNSYHTEGASQITIFLSAVFLQKS

SEQ ID NO: 943 - protein, 580 aa, Homo sapiens
  SITE (52): Xaa equals any of the naturally occurring L-amino acids
  SITE (73): Xaa equals any of the naturally occurring L-amino acids
GAQAQASARPLQAFGARARLGYGPGRRRPPSARCLSGTANRRERRRVGLSAXLGAGAHARAPPQAGAMASGSXAECLQQETTCPVCLQYFAEPMMLDCGHNICCACLARCWGTAETNVSCPQCRETFPQRHMRPNRHLANVTQLVKQLRTERPSGPGGEMGVCEKHREPLKLYCEEDQMPICVVCDRSREHRGHSVLPLEEAVEGFKEQIQNQLDHLKRVKDLKKRRRAQGEQARAELLSLTQMEREKIVWEFEQLYHSLKEHEYRLLARLEELDLAIYNSINGAITQFSCNISHLSSLIAQLEEKQQQPTRELLQDIGDTLSRAERIRIPEPWITPPDLQEKIHIFAQKCLFLTESLKQFTEKMQSDMEKIQELREAQLYSVDVTLDPDTAYPSLILSDNLRQVRYSYLQQDLPDNPERFNLFPCVLGSPCFIAGRHYWEVEVGDKAKWTIGVCEDSVCRKGGVTSAPQNGFWAVSLWYGKEYWALTSPMTALPLRTPLQRVGIFLDYDAGEVSFYNVTERCHTFTFSHATFCGPVRPYFSLSYSGGKSAAPLIICPMSGIDGFSGHVGNHGHSMETSP

SEQ ID NO: 944 - protein, 437 aa, Homo sapiens
  SITE (68): Xaa equals any of the naturally occurring L-amino acids
  SITE (166): Xaa equals any of the naturally occurring L-amino acids
  SITE (317): Xaa equals any of the naturally occurring L-amino acids
SATGSGEKECGVTATFDASRTTFTREGSFRVTTATEQAEREEIMKQMQDAKKAETDKIVVGSSVAPGXTAPSPSSPTSPTSDATTSLEMNNPHAIPRRHAPIEQLARQGSFRGFPALSQKMSPFKRQLSLRINELPSTMQRKTDFPIKNAVPEVEGEAESISSLCXQITNAFSTPEDPFSSAPMTKPVTVVAPQSPTFQGTEWGQSSGAASPGLFQAGHRRTPSEADRWLEEVSKSVRAQQPQASAAPLQPVLQPPPPTAISQPASPFQGNAFLTSQPVPVGVVPALQPAFVPAQSYPVANGMPYPAPNVPVVGITXSQMVANVFGTAGHPQAAHPHQSPSLVRQQTFPHYEASSATTSPFFKPPAQHLNGSAAFNGVDDGRLASADRHTEVPTGTCPVDPFEAQWAALENKSKQRTNPSPTNPFSSDLQKTFEIEL

SEQ ID NO: 945 - protein, 160 aa, Homo sapiens
  SITE (119): Xaa equals any of the naturally occurring L-amino acids
HGSMRRLLIPLALWLGAVGVGVAELTEAQRRGLQVALEEFHKHPPVQWAFQETSVESAVDTPFPAGIFVRLEFKLQQTSCRKRDWKKPECKVRPNGRKRKCLACIKLGSEDKVLGRLVXCPIETQVLRETQCLRVQRAGEDPHSFYFPGQFAFSKALPRS

SEQ ID NO: 946 - protein, 221 aa, Homo sapiens
  SITE (198): Xaa equals any of the naturally occurring L-amino acids
GGDPPGDLSSLSSKLLPGFTTLGFKDERRNKVTFLSSATTALSMQNNSVFGDLKSDEMELLYSAYGDETGVQCALSLQEFVKDAGSYSKKVVDDLLDQITGGDHSRTLFQLKQRRNVPMKPPDEAKVGDTLGDSSSSVLEFMSMKSYPDVSVDISMLSSLGKVKKELDPDDSHLNLDETTKLLQDLHEAQADAAALGXRPTSAPCPTPPRGTSTTWEALLA

SEQ ID NO: 947 - protein, 316 aa, Homo sapiens
  SITE (293): Xaa equals any of the naturally occurring L-amino acids
  SITE (312): Xaa equals any of the naturally occurring L-amino acids
EQYVCAQRDEYLESFCKMATRKISVITIFGPVNNSTMKIDHFQLDNEKPMRVVDDEDLVDQRLISELRKEYGMTYNDFFMVLTDVDLRVKQYYEVPITMKSVFDLIDTFQSRIKDMEKQKKEGIVCKEDKKQSLENFLSRFRWRRRLLVISAPNDEDWAYSQQLSALSGQACNFGLRHITILKLLGVGEEVGGVLELFPINGSSVVEREDVPAHLVKDIRNYFQVSPEYFSMLLVGKDGNVKSWYPSPMWSMVIVYDLIDSMQLRRQEMAIQQSLGMRCPEDEYAGYGYHSYXQGYQDGYQDDYRHHESYHXGYPY

SEQ ID NO: 948 - protein, 162 aa, Homo sapiens
STHASAHASGKQCQDSKDSNHLPKMSLSAFTLFLALIGGTSGQYYDYDFPLSIYGQSSPNCAPECNCPESYPSAMYCDELKLKSVPMVPPGIKYLYLRNNQIDHIDEKAFENVTDLQWLILDHNLLENSKIKGRVFSKLKQLKKLHINHNNLTESVGPLPKS

SEQ ID NO: 949 - protein, 185 aa, Homo sapiens
  SITE (114): Xaa equals any of the naturally occurring L-amino acids
LGFNYYYKYSNEGDSHLGGGSREGSFKETITLKWCTPRTNNIELHYCTGAYRISPVDVNSRPSSCLTNFLLNGRSVLLEQPRKSGSKVISHMLSSHGGEIFLHVLSSSRSILEXPPSISEGCGGRVTDYRITDFGEFMRENRLTPFLDPRYKIDGSLEVPLERAKDQLEKHTRYWPMDHFTNHHF

SEQ ID NO: 950 - protein, 169 aa, Homo sapiens
  SITE (161): Xaa equals any of the naturally occurring L-amino acids
PRRPHRSCDMPASGEPLGCTPLLPNDSGHPSELGGTRRAGNGALGGPKAHRKLQTHPSLASQGSKKSKSSSKSTTSQIPLQAQEDCCVHCILSCLFCEFLTLCNIVLDCATCGSCSSEDSCLCCCCCGSGECADCDLPCDLDCGILDACCESADCLEICMXCCGLCFSS

SEQ ID NO: 951 - protein, 288 aa, Homo sapiens
  SITE (161): Xaa equals any of the naturally occurring L-amino acids
  SITE (234): Xaa equals any of the naturally occurring L-amino acids
MSDETGRVPERDTKRMQVCLLSAMPLPVALQTRLAKRGILKHLEPEPEEEIIAEDYDDDPVDYEATRLEGLPPSWYKVFDPSCGLPYYWNADTDLVSWLSPHDPNSVVTKSAKKLRSSNADAEEKLDRSHDKSDRGHDKSDRSHEKLDRGHDKSDRGHDKXDRDRERGYDKVDRERERDRERDRDRGYDKADREEGKERRHHRREELAPYPKSKKAVSRKDEELDPMDPSSYSXRPRGTWSTGLPKRNEAKTGADTTAAGPLFQQRPYPSPGAVLRANAEASRTKQQD

SEQ ID NO: 952 - protein, 323 aa, Homo sapiens
VGGVLPGWKLRPRSDGGLSEDGPGRDHGGGSRGGRGGAAGGRGGCGPQGAVGGGMARASSGNGSEEAWGALRAPQQQLRELCPGVNNQPYLCESGHCCGETGCCTYYYELWWFWLLWTVLILFSCCCAFRHRRAKLRLQQQQRQREINLLAYHGACHGAGPFPTGSLLDLRFLSTFKPPAYEDVVHRPGTPPPPYTVAPGRPLTASSEQTCCSSSSSCPAHFEGTNVEGVSSHQSAPPHQEGEPGAGVTPASTPPSCRYRRLTGDSGIELCPCPASGEGEPVKEVRVSATLPDLEDYSPCALPPESVPQIFPMGLSSSEGDIP

SEQ ID NO: 953 - protein, 433 aa, Homo sapiens
AKMSVNVNRSVSDQFYRYKMPRLIAKVEGKGNGIKTVIVNMVDVAKALNRPPTYPTKYFGCELGAQTQFDVKNDRYIVNGSHEANKLQDMLDGFIKKFVLCPECENPETDLHVNPKKQTIGNSCKACGYRGMLDTHHKLCTFILKNPPENSDSGTGKKEKEKKNRKGKDKENGSVSSSETPPPPPPPNEINPPPHTMEEEEDDDWGEDTTEEAQRRRMDEISDHAKVLTLSDDLERTIEERVNILFDFVKKKKEEGVIDSSDKEIVAEAERLDVKAMGPLVLTEVLFNEKIREQIKKYRRHFLRFCHNNKKAQRYLLHGLECVVAMHQAQLISKIPHILKEMYDADLLEEEVIISWSEKASKKYVSKELAKEIRVKAEPFIKWLKEAEEESSGGEEEDEDENIEVVYSKAASVPKVETVKSDNKDDDIDIDAI

SEQ ID NO: 954 - protein, 428 aa, Homo sapiens
GYQIGMALASGPARRALAGSGQLGLGGFGAPRRGAYEWGVRSTRKSEPPPLDRVYEIPGLEPITFAGKMHFVPWLARPIFPPWDRGYKDPRFYRSPPLHEHPLYKDQACYIFHHRCRLLEGVKQALWLTKTKLIEGLPEKVLSLVDDPRNHIENQDECVLNVISHARLWQTTEEIPKRETYCPVIVDNLIQLCKSQILKHPSLARRICVQNSTFSATWNRESLLLQVRGSGGARLSTKDPLPTIASREEIEATKNHVLETFYPISPIIDLHECNIYDVKNDTGFQEGYPYPYPHTLYLLDKANLRPHRLQPDQLRAKMILFAFGSALAQARLLYGNDAKVLEQPVVVQSVGTDGRVFHFLVFQLNTTDLDSNEGVKNLAWVDSDQLLYQHFWCLPVIKKRVVVEPVGPVGFKPETFRKFLALYLHGAA

SEQ ID NO: 955 - protein, 169 aa, Homo sapiens
  SITE (131): Xaa equals any of the naturally occurring L-amino acids
  SITE (140): Xaa equals any of the naturally occurring L-amino acids
  SITE (166): Xaa equals any of the naturally occurring L-amino acids
DPRVRPRVRPRVREPGDRMLVLVLGDLHIPHRCNSLPAKFKKLLVPGKIQHILCTGNLCTKESYDYLKTLAGDVHIVRGDFDENLNYPEQKVVTVGQFKIGLIHGHQVIPWGDMASLALLQRQFDVDILIXGHTHKFEAXEHENKFYINPGSATGAYNALETNIIXSLC

SEQ ID NO: 956 - protein, 39 aa, Homo sapiens
SPYCGLQVMLFLLHHTLWCLLPCASSLRLIKKVSRLLQL

SEQ ID NO: 957 - protein, 219 aa, Homo sapiens
  SITE (7): Xaa equals any of the naturally occurring L-amino acids
  SITE (9): Xaa equals any of the naturally occurring L-amino acids
QGHCGCXLXSLLANGHDLAAAMAVDKSNPTSKHKSGAVASLLSKAERATELAAEGQLTLQQFAQSTEMLKRVVQEHLPLMSEAGAGLPDMEAVAGAEALNGQSDFPYLGAFPINPGLFIMTPAGVFLAESALHMAGLAEYPMQGELASAISSGKKKRKRCGMCAPCRRRINCEQCSSCRNRKTGHQICKFRKCEELKKKPSAALEKVMLPTGAAFRWFQ

SEQ ID NO: 958 - protein, 259 aa, Homo sapiens
  SITE (21): Xaa equals any of the naturally occurring L-amino acids
  SITE (74): Xaa equals any of the naturally occurring L-amino acids
LPQNAVLEADFAKRGYKLPKXRKTGTTIAGVVYKDGIVLGADTRATEGMVVADKNCSKIHFISPNIYCCGAGTXADTDMTTQLISSNLELHSLSTGRLPRVVTANRMLKQMLFRYQGYIGAALVLGGVDVTGPHLYSIYPHGSTDKLPYVTMGSGSLAAMAVFEDKFRPDMEEEEAKNLVSEAIAAGIFNDLGSGSNIDLCVISKNKLDFLRPYTVPNKKGTRLGRYRCEKGTTAVLTEKITPLEIEVLEETVQTMDTS

SEQ ID NO: 959 - protein, 75 aa, Homo sapiens
  SITE (36): Xaa equals any of the naturally occurring L-amino acids
  SITE (41): Xaa equals any of the naturally occurring L-amino acids
  SITE (53): Xaa equals any of the naturally occurring L-amino acids
FWSAAKFDFTSHTPFLPLEMQFRQRPCGESCNIKFXFRRSXPQTSEPLAVLPXNKNELEKKVAQLQRSKSSYFPT

SEQ ID NO: 960 - protein, 128 aa, Homo sapiens
QSRGLRLLGPGDGAGMTPGVVHASPPQSQRVPRQAPCEWAIRNIGQKPKEPNCHNCGTHIGLRSKTLRGTPNYLPIRQDTHPPSVIFCLAGVGVPGGTCRPAPCVPRFAALPWATNHPGPGCLSDLRA

SEQ ID NO: 961 - protein, 564 aa, Homo sapiens
KMKSVKIAFAVTLETVLAGHENWVNAVHWQPVFYKDGVLQQPVRLLSASMDKTMILWAPDEESGVWLEQVRVGEVGGNTLGFYDCQFNEDGSMIIAHAFHGALHLWKQNTVNPREWTPEIVISGHFDGVQDLVWDPEGEFIITVGTDQTTRLFAPWKRKDQSQVTWHEIARPQIHGYDLKCLAMINRFQFVSGADEKVLRVFSAPRNFVENFCAITGQSLNHVLCNQDSDLPEGATVPALGLSNKAVFQGDIASQPSDEEELLTSTGFEYQQVAFQPSILTEPPTEDHLLQNTLWPEVQKLYGHGYEIFCVTCNSSKTLLASACKAAKKEHAAIILWNTTSWKQVQNLVFHSLTVTQMAFSPNEKFLLAVSRDRTWSLWKKQDTISPEFEPVFSLFAFTNKITSVHSRIIWSCDWSPDSKYFFTGSRDKKVVVWGECDSTDDCIEHNIGPCSSVLDVGGAVTAVSVCPVLHPSQRYVVAVGLECGKICLYTWKKTDQVPEINDWTHCVETSQSQSHTLAIRKLCWKNCSGKTEQKEAEGAEWLHFASCGEDHTVKIHRVNKCAL

SEQ ID NO: 962 - protein, 43 aa, Homo sapiens [sequence omitted]

SEQ ID NO: 963 - protein, 132 aa, Homo sapiens
  SITE (131): Xaa equals any of the naturally occurring L-amino acids
ESRVDPRVRERSARTAGATVGPAAVMSVLRPLDKLPGLNTATILLVGTEDALLQQLADSMLKEDCASELKVHLAKSLPLPSSVNRPRIDLIVFVVNLHSKYSLQNTEESLRHVDASFFLGKVCFLATGGGXL

SEQ ID NO: 964 - protein, 175 aa, Homo sapiens
  SITE (13): Xaa equals any of the naturally occurring L-amino acids
  SITE (72): Xaa equals any of the naturally occurring L-amino acids
HERSCCDARSEAXQGRGRVGAGAGAAWSSCGVSGPGRGMGVLAAAARCLVRGADRMSKWTSKRGPRSFRGRXGRGAKGIGFLTSGWRFVQIKEMVPEFVVPDLTGFKLKPYVSYLAPESEETPLTAAQLFSEAVAPAIEKDFKDGTFDPDNLEKYGFEPTQEGKLFQLYPRNFLR

SEQ ID NO: 965 - protein, 363 aa, Homo sapiens
  SITE (356): Xaa equals any of the naturally occurring L-amino acids
LLRRLRTAVPGSLEAQKRKPSPGPGSLDLVSLGSGNSGSQRTVLIMDKQNSQMNASHPETNLPVGYPPQYPPTAFQGPPGYSGYPGPQVSYPPPPAGHSGPGPAGFPVPNQPVYNQPVYNQPVGAAGVPWMPAPQPPLNCPPGLEYLSQIDQILIHQQIELLEVLTGFETNNKYEIKNSFGQRVYFAAEDTDCCTRNCCGPSRPFTLRIIDNMGQEVITLERPLRCSSCCCPCCLQEIEIQAPPGVPIGYVIQTWHPCLPKFTIQNEKREDVLKISGPCVVCSCCGDVDFEIKSLDEQCVVGKISKHWTGILREAFTDADNFGIQFPLDLDVKMKAVMIGACFLIDFMFFESTGSXEQKSGVW

SEQ ID NO: 966 - protein, 131 aa, Homo sapiens
AEVHTRKQGPEAEPAAMSGEPGQTSVAPPPEEVEPGSGVRIVVEYCEPCGFEATYLELASAVKEQYPGIEIESRLGGTGAFEIEINGQLVFSKLENGGFPYEKDLIEAIRRASNGETLEKITNSRPPCVIL

SEQ ID NO: 967 - protein, 344 aa, Homo sapiens
  SITE (68): Xaa equals any of the naturally occurring L-amino acids
  SITE (306): Xaa equals any of the naturally occurring L-amino acids
PTPASHSPSPSLPALPPSPPHRPDSPLFNSRCSSPLQLNLLQLEELPRAEGAAVAGGPGSSAGPPPPXAEAAEPEARLAEVTESSNQDALSGSSDLLELLLQEDSRSGTGSAASGSLGSGLGSGSGSGSHEGGSTSASITRSSQSSHTSKYFGSIDSSEAEAGAARGGAEPGDQVIKYVLQDPIWLLMANADQRVMMTYQVPSRDMTSVLKQDRERLRAMQKQQPRFSEDQRRELGAVHSWVRKGQLPRALDVMACVDCGSSTQDPGHPDDPLFSELDGLGLEPMEEGGGEQGSSGGGSGEGEGCXEAQGGAKASSSQDLAMEEEEEGRSSSSPALPTAGNCTS

SEQ ID NO: 968 - protein, 67 aa, Homo sapiens
RCSSFFLSLLVKITNIWEGFKDACYGANVLSLLNSRSELLTCIQNINAQNLYMSPIRKIHWHATGDS

SEQ ID NO: 969 - protein, 325 aa, Homo sapiens
LNLRSPHICFRSSKPSWADQVEEEGEDDKCVTSELLKGIPLATGDTSPEPELLPGAPLPPPKEVINGNIKTVTEYKIDEDGKKFKIVRTFRIETRKASKAVARRKNWKKFGNSEFDPPGPNVATTTVSDDVSMTFITSKEDLNCQEEEDPMNKLKGQKIVSCRICKGDHWTTRCPYKDTLGPMQKELAEQLGLSTGEKEKLPGELEPVQATQNKTGKYVPPSLRDGASRRGESMQPNRRADDNATIRVTNLSEDTRETDLQELFRPFGSISRIYLAKDKTTGQSKGFAFISFHRREDAARAIAGVSGFGYDHLILNVEWAKPSTN

SEQ ID NO: 970 - protein, 357 aa, Homo sapiens
VRVKMAAAEAANCIMEVSCGQAESSEKPNAEDMTSKDYYFDSYAHFGIHEEMLKDEVRTLTYRNSMFHNRHLFKDKVVLDVGSGTGILCMFAAKAGARKVIGIECSSISDYAVKIVKANKLDHVVTIIKGKVEEVELPVEKVDIIISEWMGYCLFYESMLNTVLYARDKWLAPDGLIFPDRATLYVTAIEDRQYKDYKIHWWENVYGFDMSCIKDVAIKEPLVDVVDPKQLVTNACLIKEVDIYTVKVEDLTFTSPFCLQVKRNDYVHALVAYFNIEFTRCHKRTGFSTSPESPYTHWKQTVFYMEDYLTVKTGEEIFGTIGMRPNAKNNRDLDFTIDLDFKGQLCELSCSTDYRMR

SEQ ID NO: 971 - protein, 176 aa, Homo sapiens
  SITE (10): Xaa equals any of the naturally occurring L-amino acids
  SITE (11): Xaa equals any of the naturally occurring L-amino acids
  SITE (176): Xaa equals any of the naturally occurring L-amino acids
GVPRRAYQAXXLRRVDDFKKAFSKEKMEKTKVRTRENLEKTRLKTKENLEKTRHTLEKRMNKLGTRLVPAERREKLKTSRDKLRKSFTPDHVVYARSKTAVYKVPPFTFHVKKIREGQVEVLKATEMVEVGADDDEGGAERGEAGDLRRGSSPDVHALLEITEESDAVLVDKSDSX

SEQ ID NO: 972 - protein, 159 aa, Homo sapiens
GKARRRAAKLQSSQEPEAPPPRDVALLQGRANDLVKYLLAKDQTKIPIKRSDMLKDIIKEYTDVYPEIIERAGYSLEKVFGIQLKEIDKNDHLYILLSTLEPTDAGILGTTKDSPKLGLLMVLLSIIFMNGNRSSEAVIWEVLRKLGLRLGYIIHSLGT

SEQ ID NO: 973 - protein, 233 aa, Homo sapiens
  SITE (3): Xaa equals any of the naturally occurring L-amino acids
RAXKAAPRRALARLVLAWCRWLVSATCVGTADRKMSSGNAKIGHPAPNFKATAVMPDGQFKDISLSDYKGKYVVFFFYPLDFTFVCPTEIIAFSDRAEEFKKLNCQVIGASVDSHFCHLAWVNTPKKQGGLGPMNIPLVSDPKRTIAQDYGVLKADEGISFRGLFIIDDKGILRQITVNDLPVGRSVDETLRLVQAFQFTDKHGEVCPAGWKPGSDTIKPDVQKSKEYFSKQK

SEQ ID NO: 974 - protein, 174 aa, Homo sapiens
  SITE (37): Xaa equals any of the naturally occurring L-amino acids
SWDRRLMQDDNRGLGQGLKDNKRTCNRFRLLLERRTXGSEVQDSHSTSYPSLLSHLTSMYLNAPALALPVARMQLPGPGLRSFHPLASSLPCDFHLLNLRTLQAEEDTLPSAETALILHRKVLTAAWRQELGLQLHHKPRQGSPGQPFPWPGCGIPSANLLDVTVPSGLPVQQH

SEQ ID NO: 975 - protein, 380 aa, Homo sapiens
  SITE (134): Xaa equals any of the naturally occurring L-amino acids
RPEVRHSREAPESRRWAVWRSLESLPRHQLLCLPVGAPPAPAMLSALARPASAALRRSFSTSAQNNAKVAVLGASGGIGQPLSLLLKNSPLVSRLTLYDIAHTPGVAADLSHIETKAAVKGYLGPEQLPDCLKXCDVVVIPAGVPRKPGMTRDDLFNTNATIVATLTAACAQHCPEAMICVIANPVNSTIPITAEVFKKHGVYNPNKIFGVTTLDIVRANTFVAELKGLDPARVNVPVIGGHAGKTIIPLISQCTPKVDFPQDQLTALTGRIQEAGTEVVKAKAGAGSATLSMAYAGARFVFSLVDAMNGKEGVVECSFVKSQETECTYFSTPLLLGKKGIEKNLGIGKVSSFEEKMISDAIPELKASIKKGEDFVKTLK

SEQ ID NO: 976 - protein, 269 aa, Homo sapiens
AALSQITIATPPAVKQTISNISGFNETCLRWRSIKTADMEEMYLFHIWGQRWYQKEFAQEMTFNISSSSRDPEVCLDLRPGTNYNVSLRALSSELPVVISLTTQITEPPLPEVEFFTVHRGPLPRLRLRKAKEKNGPISSYQVLVLPLALQSTFSCDSEGASSFFSNASDADGYVAAELLAKDVPDDAMEIPIGDRLYYGEYYNAPLKRGSDYCIILRITSEWNKVRRHSCAVWAQVKDSSLMLLQMAGVGLGSLAVVIILTFLSFSAV

SEQ ID NO: 977 - protein, 477 aa, Homo sapiens
  SITE (471): Xaa equals any of the naturally occurring L-amino acids
  SITE (473): Xaa equals any of the naturally occurring L-amino acids
LFSPQVELTKAMVMEKPSPLLVGREFVRQYYTLLNQAPDMLHRFYGKNSSYVHGGLDSNGKPADAVYGQKEIHRKVMSQNFTNCHTKIRHVDAHATLNDGVVVQVMGLLSNNNQALRRFMQTFVLAPEGSVANKFYVHNDIFRYQDEVFGGFVTEPQEESEEEVEEPEERQQTPEVVPDDSGTFYDQAVVSNDMEEHLEEPVAEPEPDPEPEPEQEPVSEIQEEKPEPVLEETAPEDAQKSSSPAPADIAQTVQEDLRTFSWASVTSKNLPPSGAVPVTGIPPHVVKVPASQPRPESKPESQIPPQRPQRDQRVREQRINIPPQRGPRPIREAGEQGDIEPRRMVRHPDSHQLFIGNLPHEVDKSELKDFFQSYGNVVELRINSGGKLPNFGFVVFDDSEPVQKVLSNRPIMFRGEVRLNVEEKKTRAAREGDRRDNRLRGPGGPRGGLGGGMRGPPRGGMVQKPGFGVGXGXAPRQ

SEQ ID NO: 978 - protein, 339 aa, Homo sapiens
  SITE (128): Xaa equals any of the naturally occurring L-amino acids
  SITE (326): Xaa equals any of the naturally occurring L-amino acids
  SITE (336): Xaa equals any of the naturally occurring L-amino acids
  SITE (339): Xaa equals any of the naturally occurring L-amino acids
PVAAVSGRAVGGSRGGGRGGMAAAAAGAGSGPWAAQEKQFPPALLSFFIYNPRFGPREGQEENKILFYHPNEVEKNEKIRNVGLCEAIVQFTRTFSPSKPAKSLHTQKNRQFFNEPEENFWMVMVVRXPIIEKQSKDGKPVIEYQEEELLDKVYSSVLRQCYSMYKLFNGTFLKAMEDGGVKLLKERLEKFFHRYLQTLHLQSCDLLDIFGGISFFPLDKMTYLKIQSFINRMEESLNIVKYTAFLYNDQLIWSGLEQDDMRILYKYLTTSLFPRHIEPELAGRDSPIRAEMPGNLQHYGRFLTGPLNLNDPDAKCRFPKIFVNTXDTYEELHLIXYKX

SEQ ID NO: 979 - protein, 283 aa, Homo sapiens
HRERRVGLRCARRTSEAAGSGAGPPGPLQGRSGSSWAPRPGRRTEERRKGAGGTRPRPAAAMNSNVENLPPHIIRLVYKEVTTLTADPPDGIKVFPNEEDLTDLQVTIEGPEGTPYAGGLFRMKLLLGKDFPASPPKGYFLTKIFHPNVGANGEICVNVLKRDWTAELGIRHVLLTIKCLLIHPNPESALNEEAGRLLLENYEEYAARARLLTEIHGGAGGPSGRAEAGRALASGTEASSTDPGAPGGPGGAEGPMAKKHAGERDKKLAAKKKTDKKRALRRL

SEQ ID NO: 980 - protein, 353 aa, Homo sapiens
  SITE (333): Xaa equals any of the naturally occurring L-amino acids
  SITE (346): Xaa equals any of the naturally occurring L-amino acids
RKQCQDSKDSNHLPKMSLSAFTLFLALIGGTSGQYYDYDFPLSIYGQSSPNCAPECNCPESYPSAMYCDELKLKSVPMVPPGIKYLYLRNNQIDHIDEKAFENVTDLQWLILDHNLLENSKIKGRVFSKLKQLKKLHINHNNLTESVGPLPKSLEDLQLTHNKITKLGSFEGLVNLTFIHLQHNRLKEDAVSAAFKGLKSLEYLDLSFNQIARLPSGLPVSLLTLYLDNNKISNIPDEYFKRFNALQYLRLSHNELADSGIPGNSFNVSSLVELDLSYNKLKNIPTVNENLENYYLEVNQLEKFDIKSFCKILGPLSYSKIKHLRLDGNRISXTSLPPDMYECLRXANEVTLN

SEQ ID NO: 981 - protein, 343 aa, Homo sapiens
  SITE (343): Xaa equals any of the naturally occurring L-amino acids
NLTKNMTALSSENCSFQYQLRQTNQPLDVNYLLFLIILGKILLNILTLGMRRKNTCQNFMEYFCISLAFVDLLLLVNISIILYFRDFVLLSIRFTKYHICLFTQIISFTYGFLHYPVFLTACIDYCLNFSKTTKLSFKCQKLFYFFTVILIWISVLAYVLGDPAIYQSLKAQNAYSRHCPFYVSIQSYWLSFFMVMILFVAFITCWEEVTTLVQAIRITSYMNETILYFPFSSHSSYTVRSKKIFLSKLIVCFLSTWLPFVLLQVIIVLLKVQIPAYIEMNIPWLYFVNSFLIATVYWFNCHKLNLKDIGLPLDPFVNWKCCFIPLTIPNLEQIEKPISIMIX

SEQ ID NO: 982 - protein, 142 aa, Homo sapiens
  SITE (108): Xaa equals any of the naturally occurring L-amino acids
  SITE (111): Xaa equals any of the naturally occurring L-amino acids
  SITE (114): Xaa equals any of the naturally occurring L-amino acids
  SITE (121): Xaa equals any of the naturally occurring L-amino acids
  SITE (122): Xaa equals any of the naturally occurring L-amino acids
  SITE (126): Xaa equals any of the naturally occurring L-amino acids
  SITE (127): Xaa equals any of the naturally occurring L-amino acids
  SITE (132): Xaa equals any of the naturally occurring L-amino acids
GLPPSTFLHSAVSTLPHRPSPPSLLPAPCKPLRLGLATVPAGSPGLGVGDSLQARSPETSEGHPLRVARPPVANLSAASATSPAGPWFRWPPRCLAETRHGPSAGPHXFPXPGXWHCSRQXXGHQXXNRTQXPAQTAAGMGA

SEQ ID NO: 983 - protein, 193 aa, Homo sapiens
  SITE (72): Xaa equals any of the naturally occurring L-amino acids
  SITE (135): Xaa equals any of the naturally occurring L-amino acids
  SITE (139): Xaa equals any of the naturally occurring L-amino acids
VNFKAFEMGKDYYCILGIEKGASDEDIKKAYRKQALKFHPDKNKSPQAEEKFKEVAEAYEVLSDPKKREIYXQFGEEGLKGGAGGTDGQGGTFRYTFHGDPHATFAAFFGGSNPFEIFFGRRMGGGRDSEEMEIXGDPXSAFGFSMNGYPRDRNSVGPSRLKQDPPVIHELRVSLEEIYSGCTKRDERFLEKG

SEQ ID NO: 984 - protein, 402 aa, Homo sapiens
KSYEMELEEGKAGSGLRQYYLSKIEELQLIVNDKSQNLRRLQAQRNELNAKVRLLREELQLLQEQGSYVGEVVRAMDKKKVLVKVHPEGKFVVDVDKNIDINDVTPNCRVALRNDSYTLHKILPNKVDPLVSLMMVEKVPDSTYEMIGGLDKQIKEIKEVIELPVKHPELFEALGIAQPKGVLLYGPPGTGKTLLARAVAHHTDCTFIRVSGSELVQKFIGEGARMVRELFVMAREHAPSIIFMDEIDSIGSSRLEGGSGGDSEVQRTMLELLNQLDGFEATKNIKVIMATNRIDILDSALLRPGRIDRKIEFPPPNEEARLDILKIHSRKMNLTRGINLRKIAELMPGASGAEVKGVCTEAGMYALRERRVHVTQEDFEMAVAKVMQKDSEKNMSIKKLWK

SEQ ID NO: 985 - protein, 347 aa, Homo sapiens
RRRRWHPGPGGPRRTAGKGPRKVASASAAASTLSEPPRRTQESRTRTRALGLPTLPMEKLAASTEPQGPRPVLGRESVQVPDDQDFRSFRSECEAEVGWNLTYSRAGVSVWVQAVEMDRTLHKIKCRMECCDVPAETLYDVLHDIEYRKKWDSNVIETFDIARLTVNADVGYYSWRCPKPLKNRDVITLRSWLPMGADYIIMNYSVKHPKYPPRKDLVRAVSIQTGYLIQSTGPKSCVITYLAQVDPKGSLPKWVVNKSSQFLAPKAMKKMYKACLKYPEWKQKHLPHFKPWLHPEQSPLPSLALSELSVQHADSLENIDESAVAESREERMGGAGGEGSDDDTSLT

SEQ ID NO: 986 - protein, 106 aa, Homo sapiens
  SITE (36): Xaa equals any of the naturally occurring L-amino acids
ASICADAKLWTMYARPSNRQRCLGSKHTERTWTAWXRSLIRPFSMHILPKQSQIPLKGADSISSSVQTLRAERSGSGSHVTAQNNLRNPLCPEGSLTSPSGSEQSL

SEQ ID NO: 987 - protein, 172 aa, Homo sapiens
TPRGAVKPSANKYPIFFFGTHETAFLGPKDLFPYKEYKDKFGKSNKRKGFNEGLWEIENNPGVKFTGYQAIQQQSSSETEGEGGNTADASSEEEGDRVEEDGKGKRKNEKAGSKRKKSYTSKKSSKQSRKSPGDEDDKDCKEEENKSSSEGGDAGNDTRNTTSDLQKTSEGT

SEQ ID NO: 988 - protein, 238 aa, Homo sapiens
  SITE (101): Xaa equals any of the naturally occurring L-amino acids
  SITE (146): Xaa equals any of the naturally occurring L-amino acids
AKQDPVPEQEMSPSISDPCLGQALMGGPSFKAVVGTAPPNASLSFLPIHQYTAGPFLVFVQQETHFWWDMPSSATGPLTPCISVLPVSAGTDSKGKPSVWXIGGWEQRGENAVLSFCLGIPHTTWVLPGKPVLSKTMDLASPTGLXSQHLREGGWKRLCPHFELQAGSAALKPSSDFLTQDPAPGRRRVGAGLVGQKEASAGLEDPSSTSHSVSSSWENLCQARAVIGPHEVSEAPSW

SEQ ID NO: 989 - protein, 74 aa, Homo sapiens [sequence omitted]

SEQ ID NO: 990 - protein, 295 aa, Homo sapiens
APARPGSLPSTRSAPLVPSSRRRPAESPLRSRRCRGDMVLCVQGPRPLLAVERTGQRPLWAPSLELPKPVMQPLPAGAFLEEVAEGTPAQTESEPKVLDPEEDLLCIAKTFSYLRESGWYWGSITASEARQHLQKMPEGTFLVRDSTHPSYLFTLSVKTTRGPTNVRIEYADSSFRLDSNCLSRPRILAFPDVVSLVQHYVASCTADTRSDSPDPAPTPALPMPKEDAPSDPALPAPPPATAVHLKLVQPFVRRSSARSLQHLCRLVINRLVADVDCLPLPRRMADYLRQYPFQL

SEQ ID NO: 991 - protein, 58 aa, Homo sapiens
LHKVSILLYSAVLVSFSCIGFHCIYSLFMLNLAKDEHCPPLKCLCHFEFCANFVARMR

SEQ ID NO: 992 - protein, 203 aa, Homo sapiens
  SITE (8): Xaa equals any of the naturally occurring L-amino acids
AHASPTRXEARVVVVRCLPACVRDLPDSVAAMASDEGKLFVGGLSFDTNEQSLEQVFSKYGQISEVVVVKDRETQRSRGFGFVTFENIDDAKDAMMAMNGKSVDGRQIRVDQAGKSSDNRSRGYRGGSAGGRGFFRGGRGRGRGFSRGGGDRGYGGNRFESRSGGYGGSRDYYSSRSQSGGYSDRSSGGSYRDSYDSYATHNE

SEQ ID NO: 993 - protein, 252 aa, Homo sapiens
GGLAWRALRTSGTLLRVERLLLEDYCPEEKMFGFHKPKMYRSIEGCCICRAKSSSSRFTDSKRYEKDFQSCFGLHETRSGDICNACVLLVKRWKKLPAGSKKNWNHVVDARAGPSLKTTLKPKKVKTLSGNRIKSNQISKLQKEFKRHNSDAHSTTSSASPAQSPCYSNQSDDGSDTEMASGSNRTPVFSFLDLTYWKRQKICCGIIYKGRFGEVLIDTHLFKPCCSNKKAAAEKPEEQGQSLCPSPLRSGD

SEQ ID NO: 994 - protein, 170 aa, Homo sapiens
  SITE (5): Xaa equals any of the naturally occurring L-amino acids
RTRGXDTQPTVCTDAPSLLPLSRLHLRGSWDRRSVANMQLFVRAQELHTFEVTGQETVAQIKAHVASLEGIAPEDQVVLLAGAPLEDEATLGQCGVEALTTLEVAGRMLGGKVHGSLARAGKVRGQTPKVAKQEKKKKKTGRAKRRMQYNRRFVNVVPTFGKKKGPNANS

SEQ ID NO: 995 - protein, 156 aa, Homo sapiens
GSGTHPARAAPAPHARASFSRPLAPRRSHLSSLAHARPAREPRRRLGPAEAPPRHVFASRRKLETKAGHPPAVKAGGMRIVQKHPHTGDTKEEKDKDDQEWESPSPPKPTVFISGVIARGDKDFPPAAAQVAHQKPHASMDKHPSPRTQHIQQPRK

SEQ ID NO: 996 - protein, 217 aa, Homo sapiens
  SITE (27): Xaa equals any of the naturally occurring L-amino acids
NSAEQEGSQWSLPVLHSVPDPACLTLXRVSKGLAAVRSSVPRAGGVSRRLAAVRSTVLCRAVGCILAELLAHRPLLPGTSEIHQIDLIVQLLGTPSENIWPGFSKLPLVGQYSLRKQPYNNLKHKFPWLSEAGLRCCTSCSCTTLRKGRRPGTAWRAPISRRSPYPVSRSSCRPFPTTATSGPPQPPPRARASAVNPDGGPGTRLYSHTRSSDQWCL

SEQ ID NO: 997 - protein, 466 aa, Homo sapiens
VSPRAGGAGNNRGRAHRASSCSLPAPPATLDPRIPPARLPAMADKEAAFDDAVEERVINEEYKIWKKNTPFLYDLVMTHALEWPSLTAQWLPDVTRPEGKDFSIHRLVLGTHTSDEQNHLVIASVQLPNDDAQFDASHYDSEKGEFGGFGSVSGKIEIEIKINHEGEVNRARYMPQNPCIIATKTPSSDVLVFDYTKHPSKPDPSGECNPDLRLRGHQKEGYGLSWNPNLSGHLLSASDDHTICLWDISAVPKEGKVVDAKTIFTGHTAVVEDVSWHLLHESLFGSVADDQKLMIWDTRSNNTSKPSHSVDAHTAEVNCLSFNPYSEFILATGSADKTVALWDLRNLKLKLHSFESHKDEIFQVQWSPHNETILASSGTDRRLNVWDLSKIGEEQSPEDAEDGPPELLFIHGGHTAKISDFSWNPNEPWVICSVSEDNIMQVWQMAENIYNDEDPEGSVDPEGQGS

SEQ ID NO: 998 - protein, 165 aa, Homo sapiens
TRPPTRRPTRPPKAKKEAPAPPKAEAKAKALKAKKAVLKGVHSHKKKKIRTSPTFRRPKTLRLRRQPKYPRKSAPRRNKLDHYAIIKFPLTTESAMKKIEDNNTLVFIVDVKANKHQIKQAVKKLYDIDVAKVNTLIRPDGEKKAYVRLAPDYDALDVANKIGII

SEQ ID NO: 999 - protein, 194 aa, Homo sapiens
PENSTSSFLLWGCPPSVVCFTVGSPARRPQCFLRAEMANSGLQLLGFSMALLGWVGLVACTAIPQWQMSSYAGDNIITAQAMYKGLWMDCVTQSTGMMSCKMYDSVLALSAALQATRALMVVSLVLGFLAMFVATMGMKCTRCGGDDKVKKARIAMGGGIIFIVAGLAALVACSWYGHQIVTDFYNPLIPTNIK

SEQ ID NO: 1000 - protein, 362 aa, Homo sapiens
  SITE (25): Xaa equals any of the naturally occurring L-amino acids
RQQRTRKKKPAGAALGALGPRAQLXAAAQTNSNAAGKQLRKESQKDRKNPLPPSVGVVDKKEETQPPVALKKEGIRRVGRRPDQQLQGEGKIIDRRPERRPPRERRFEKPLEEKGEGGEFSVDRPIIDRPIRGRGGLGRGRGGRGRGMGRGDGFDSRGKREFDRHSGSDRSSFSHYSGLKHEDKRGGSGSHNWGTVKDELTDLDQSNVTEETPEGEEHHPVADTENKENEVEEVKEEGPKEMTLDEWKAIQNKDRAKVEFNIRKPNEGADGQWKKGFVLHKSKSEEAHAEDSVMDHHFRKPANDITSQLEINFGDLGRPGRGGRGGRGGRGRGGRPNRGSRTDKSSASAPDVDDPEAFPALA

SEQ ID NO: 1001 - protein, 207 aa, Homo sapiens
LMSVVRGFSEAAAQYNPEPPPPRTHYSNIEANESEEVRQFRRLFAQLAGDDMEVSATELMNILNKVVTRHPDLKTDGFGIDTCRSMVAVMDSDTTGKLGFEEFKYLWNNIKRWQAIYKQFDTDRSGTICSSELPGAFEAAGFHLNEHLYNMIIRRYSDESGNMDFDNFISCLVRLDAMFRAFKSLDKDGTGQIQVNIQEWLQLTMYS

SEQ ID NO: 1002 - protein, 21 aa, Homo sapiens
  SITE (12): Xaa equals any of the naturally occurring L-amino acids
IFCDTRSHQVAXGWFRIPGLK

SEQ ID NO: 1003 - protein, 109 aa, Homo sapiens
  SITE (15): Xaa equals any of the naturally occurring L-amino acids
  SITE (19): Xaa equals any of the naturally occurring L-amino acids
  SITE (103): Xaa equals any of the naturally occurring L-amino acids
MPQLGLSCIPVEGPXPCLXEVRLCCVNGQALPQPTPGKVHLFSGLYKVSWGPVASLPVRSDFSLSSSPVGETKPDWGAQGEHGKGRLPCLSLAVRVRVTHTKXECGQQV

SEQ ID NO: 1004 - protein, 542 aa, Homo sapiens
  SITE (252): Xaa equals any of the naturally occurring L-amino acids
  SITE (519): Xaa equals any of the naturally occurring L-amino acids
KDPEEYCCTPAARGRGKSAALGLAIAGAVAFGYSNIFVTSPSPDNLHTLFEFVFKGFDALQYQEHLDYEIIQSLNPEFNKAVIRVNVFREHRQTIQYIHPADAVKLGQAELVVIDEAAAIPLPLVKSLLGPYLVFMASTINGYEGTGRSLSLKLIQQLRQQSAQSQVSTTAENKTTTTARLASARTLHEVSLQESIRYAPGDAVEKWLNDLLCLDCLNITRIVSGCPLPEACELYYVNRDTLFCYHKASEVXLQRLMALYVASHYKNSPNDLQMLSDAPAHHLFCLLPPVPPTQNALPEVLAVIQVCLEGEISRQSILNSLSRGKKASGDLIPWTVSEQFQDPDFGGLSGGRVVRIAVHPDYQGMGYGSRALQLLQMYYEGRFPCLEEKVLETPQEIHTVSSEAVSLLEEVITPRKDLPPLLLKLNERPAERLDYLGVSYGLTPRLLKFWKRAGFVPVYLRQTPNDLTGEHSCIMLKTLTDEDEADQGGWLAAFWKDFRRRFLALLSYQFSTFSPSLAXNIIQNRNMGKPAQPALSREELEA

SEQ ID NO: 1005 - protein, 202 aa, Homo sapiens
  SITE (77): Xaa equals any of the naturally occurring L-amino acids
DAADTIETDTATADTTVANNVPPAATSLIDLWPGNGEGASTLQGEPRAPTPPSGTEVTLAEVPLLDEVAPEPLLPAXEGCATLLNFDELPEPPATFCDPEEVEGEPLAAPQTPTLPSALEELEQEQEPEPHLLTNGETTQKEGTQASEGYFSQSQEEEFAQSEELCAKAPPPVFYNKPPEIDITCWDADPVPEEEEGFEGGD

SEQ ID NO: 1006 - protein, 561 aa, Homo sapiens
SAMRKFAYCKVVLATSLIWVLLDMFLLLYFSECNKCDEKKERGLPAGDVLEPVQKPHEGPGEMGKPVVIPKEDQEKMKEMFKINQFNLMASEMIALNRSLPDVRLEGCKTKVYPDNLPTTSVVIVFHNEAWSTLLRTVHSVINRSPRHMIEEIVLVDDASERDFLKRPLESYVKKLKVPVHVIRMEQRSGLIRARLKGAAVSKGQVITFLDAHCECTVGWLEPLLARIKHDRRTVVCPIIDVISDDTFEYMAGSDMTYGGFNWKLNFRWYPVPQREMDRRKGDRTLPVRTPTMAGGLFSIDRDYFQEIGTYDAGMDIWGGENLEISFRIWQCGGTLEIVTCSHVGHVFRKATPYTFPGGTGQIINKNNRRLAEVWMDEFKNFFYIISPGVTKVDYGDISSRVGLRHKLQCKPFSWYLENIYPDSQIPRHYFSLGEIRNVETNQCLDNMARKENEKVGIFNCHGMGGNQVFSYTANKEIRTDDLCLDVSKLNGPVTMLKCHHLKGNQLWEYDPVKLTLQHVNSNQCLDKATEEDSQVPSIRDCNGSRSQQWLLRNVTLPEIF

SEQ ID NO: 1007 - protein, 189 aa, Homo sapiens
FIPIGENSATGENRLASALWIGDRSYPGLSEGNSRPPIPGPPYVASPDLWSHWEDSALPPPSLRPVQPTWEGSSEAGLDWAGASFSPGTPMWAALDEQMLQEGIQASLLDGPAQEPQSAPWLSKSSVSSLRLQQLERMGFPTEQAVVALAATGRVEGAVSLLVGGQVGTETLVTHGKGGPAHSEGPGPP

SEQ ID NO: 1008 - protein, 300 aa, Homo sapiens
  SITE (6): Xaa equals any of the naturally occurring L-amino acids
  SITE (13): Xaa equals any of the naturally occurring L-amino acids
  SITE (39): Xaa equals any of the naturally occurring L-amino acids
RQKSSXLWPHPLXRHRAGPGLAGNGGILPNLGDGGGGWXWWEGNHVLLNLFLVPPIPRPTRHHTADNTHPLAQASIHMCCTFSSRHADNPTRPHHHMPKCTHTEPHRPSGPAGSSLGFPLAHFQGPGAATKCESSVAAPSFSPSTSIGPIGKHRGLTLFHIPCPALKWTITFWDRLKFLKSLHHSVPSKGSPCQWGFEREFLEPTFKFCLIWRETKIGRGKRTPDVLLLPEILETDSLDWKMDKSALTWRVGTRWGPALPTAAVASSLAGFAGRQQEGEGGSTARGTGGAAGLQELFFHC

SEQ ID NO: 1009 - protein, 344 aa, Homo sapiens
  SITE (10): Xaa equals any of the naturally occurring L-amino acids
  SITE (38): Xaa equals any of the naturally occurring L-amino acids
RPPCPHSRSXWRILSLTPNPDPLPNMSVFFFIFLNIFXLAFSSPGSQPLLNSPPSFVCWSRGFMEMNGRGELVESLKRFCASTRLPPTPLLLFPEEEATNGREGLLRFSSWPFSIQDVVQPLTLQVQRPLVSVTVSDASWVSELLWSLFVPFTVYQVRWLRPVHRQLGEANEEFALRVQQLVAKELGQTGTRLTPADKAEHMKRQRHPRLRPQSAQSSFPPSPGPSPDVQLATLAQRVKEVLPHVPLGVIQRDLAKTGCVDLTITNLLEGAVAFMPEDITKGTQSLPTASASKFPSSGPVTPQPTALTFAKSSWARQESLQERKQALYEYARRRFTERRAQEAD

SEQ ID NO: 1010 - protein, 233 aa, Homo sapiens
PHCEPNPGAGAMVLLHVLFEHAVGYALLALKEVEEISLLQPQVEESVLNLGKFHSIVRLVAFCPFASSQVALENANAVSEGVVHEDLRLLLETHLPSKKKKVLLGVGDPKIGAAIQEELGYNCQTGGVIAEILRGVRLHFHNLVKGLTDLSACKAQLGLGHSYSRAKVKFNVNRVDNMIIQSISLLDQLDKDINTFSMRVREWYGYHFPELVKIINDNATYCRLAQFIGNRRN

SEQ ID NO: 1011 - protein, 187 aa, Homo sapiens
  SITE (4): Xaa equals any of the naturally occurring L-amino acids
GTSXFSFPLGREEAMAAMASLGALALLLLSSLSRCSAEACLEPQITPSYYTTSDAVISTETVFIVEISLTCKNRVQNMALYADVGGKQFPVTRGQDVGRYQVSWSLDHKSAHAGTYEVRFFDEESYSLLRKAQRNNEDISIIPPLFTVSVDHRGTWNGPWVSTEVLAAAIGLVIYYLAFSAKSHIQA

SEQ ID NO: 1012 - protein, 708 aa, Homo sapiens
  SITE (18): Xaa equals any of the naturally occurring L-amino acids
  SITE (153): Xaa equals any of the naturally occurring L-amino acids
  SITE (229): Xaa equals any of the naturally occurring L-amino acids
  SITE (433): Xaa equals any of the naturally occurring L-amino acids
ALRPISSVRAGDRCQRSXAADMAASTAAGKQRIPKVAKVKNKAPAEVQITAEQLLREAKERELELLPPPPQQKITDEEELNDYKLRKRKTFEDNIRKNRTVISNWIKYAQWEESLKEIQRARSIYERALDVDYRNITLWLKYAEMEMKNRQVXHARNIWDRAITTLPRVNQFWYKYTYMEEMLGNVAGARQVFERWMEWQPEEQAWHSYINFELRYKEVDRARTIYERXVLVHPDVKNWIKYARFEEKHAYFAHARKVYERAVEFFGDEHMDEHLYVAFAKFEENQKEFERVRVIYKYALDRISKQDAQELFKNYTIFEKKFGDRRGIEDIIVSKRRFQYEEEVKANPHNYDAWFDYLRLVESDAEAEAVREVYERAIANVPPIQEKRHWKRYIYLWINYALYEELEAKDPERTRQVYQASLELIPHKKFTFXKMWILYAQFEIRQKNLSLARRALGTSIGKCPKNKLFKVYIELELQLREFDRCRKLYEKFLEFGPENCTSWIKFAELETILGDIDRARAIYELAISQPRLDMPEVLWKSYIDFEIEQEETERTRNLYRRLLQRTQHVKVWISFAQFELSSGKEGSLTKCRQIYEEANKTMRNCEEKEERLMLLESWRSFEEEFGTASDKERVDKLMPEKVKKRRKVQTDDGSDAGWEEYFDYIFPEDAANQPNLKLLAMAKLWKKQQQEKEDAEHHPDEDVDESES

SEQ ID NO: 1013 - protein, 183 aa, Homo sapiens
LPPQVADTMLPPMALPSVSWMLLSCLMLLSQVQGEEPQRELPSARIRCPKGSKAYGSHCYALFLSPKSWTDADLACQKRPSGNLVSVLSGAEGSFVSSLVKSIGNSYSYVWIGLHDPTQGTEPNGEGWEWSSSDVMNYFAWERNPSTISSPGHCASLSRSTAFLRWKDYNCNVRLPYVCKFTD

SEQ ID NO: 1014 - protein, 213 aa, Homo sapiens
VTDGGSARKPKMAVPAALILRESPSMKKAVSLINAIDTGRFPRLLTRILQKLHLKAESSFSEEEEEKLQAAFSLEKQDLHLVLETISFILEQAVYHNVKPAALQQQLENIHLRQDKAEAFVNTWSSMGQETVEKFRQRILAPCKLETVGWQLNLQMAHSAQAKLKSPQAVLQLGVNNEDSKSLEKVLVEFSHKELFDFYNKLETIQAQLDSLT

SEQ ID NO: 1015 - protein, 544 aa, Homo sapiens
APGTMNGEAICSALPTIPYHKLADLRYLSRGASGTVSSARHADWRVQVAVKHLHIHTPLLDSERKDVLREAEILHKARFSYILPILGICNEPEFLGIVTEYMPNGSLNELLHRKTEYPDVAWPLRFRILHEIALGVNYLHNMTPPLLHHDLKTQNILLDNEFHVKIADFGLSKWRMMSLSQSRSSKSAPEGGTIIYMPPENYEPGQKSRASIKHDIYSYAVITWEVLSRKQPFEDVTNPLQIMYSVSQGHRPVINEESLPYDIPHRARMISLIESGWAQNPDERPSFLKCLIELEPVLRTFEEITFLEAVIQLKKTKLQSVSSAIHLCDKKKMELSLNIPVNHGPQEESCGSSQLHENSGSPETSRSLPAPQDNDFLSRKAQDCYFMKLHHCPGNHSWDSTISGSQRAAFCDHKTTPCSSAIINPLSTAGNSERLQPGIAQQWIQSKREDIVNQMTEACLNQSLDALLSRDLIMKEDYELVSTKPTRTSKVRQLLDTTDIQGEEFAKVIVQKLKDNKQMGLQPYPEILVVSRSPSLNLLQNKSM

SEQ ID NO: 1016 - protein, 257 aa, Homo sapiens
HPSAPRAGKAHLKRAILGQEEALRLHALCRVLREVDLLRAVISQTLQRSLAKYAELDREDDFCEAAEAPDIQPKTHQKPEARMPRLSQGKGPDIFHRLGPLSVFSAKNRWRLVGPVHLTRGEGGFGLTLRGDSPVLIAAVIPGSQAAAAGLKEGDYIVSVNGQPCRWWRHAEVVTELKAAGEAGASLQVVSLLPSSRLPSLGDRRPVLLGPRGLLRSQREHGCKTPASTWASPRALLNWSRKAQQGKTGGCPSPVPQ

SEQ ID NO: 1017 - protein, 248 aa, Homo sapiens
ASDRRGYSSRIVGGNMSLLSQWPWQASLQFQGYHLCGGSVITPLWIITAAHCVYDLYLPKSWTIQVGLVSLLDNPAPSHLVEKIVYHSKYKPKRLGNDIALMKLAGPLTFNEMIQPVCLPNSEENFPDGKVCWTSGWGATEDGAGDASPVLNHAAVPLISNKICNHRDVYGGIISPSMLCAGYLTGGVDSCQGDSGGPLVCQERRLWKLVGATSFGIGCAEVNKPGVYTRVTSFLDWIHEQMERDLKT

SEQ ID NO: 1018 - protein, 224 aa, Homo sapiens
GRVSAPVPGKMVLGGCPVSYLLLCGQAALLLGNLLLLHCVSRSHSQNATAEPELTSAGAAQPEGPGGAASWEYGDPHSPVILCSYLPDEFIECEDPVDHVGNATASQELGYGCLKFGGQAYSDVEHTSVQCHALDGIECASPRTFLRENKPCIKYTGHYFITTLLYSFFLGCFGVDRFCLGHTGTAVGKLLTLGGLGIWWFVDLILLITGGLMPSDGSNWCTVY

SEQ ID NO: 1019 - protein, 53 aa, Homo sapiens
NVPVCHLSTWKILYIWKVYASLNKYMLLNKPYHSLRNCIYFIICPFRNQVFCI

SEQ ID NO: 1020 - protein, 70 aa, Homo sapiens
FYTNLIWLPFVPLISQMFKCIGFGFSMYKLPYLLMSIFCLFNFVYLLFCFWIHFLIRSHMINIISIVIIP

SEQ ID NO: 1021 - protein, 337 aa, Homo sapiens
RKRKQAARAAEEPGAAMDVRALPWLPWLLWLLCRGGGDADSRAPFTPTWPRSREREAAAFRESLNRHRYLNSLFPSENSTAFYGINQFSYLFPEEFKAIYLRSKPSKFPRYSAEVHMSIPNVSLPLRFDWRDKQVVTQVRNQQMCGGCWAFSVVGAVESAYAIKGKPLEDLSVQQVIDCSYNNYGCNGGSTLNALNWLNKMQVKLVKDSEYPFKAQNGLCHYFSGSHSGFSIKGYSAYDFSDQEDEMAKALLTFGPLVVIVDAVSWQDYLGGIIQHHCSSGEANHAVLITGFDKTGSTPYWIVRNSWGSSWGVDGYAHVKMGSNVCGIADSVSSIFV

SEQ ID NO: 1022 - protein, 134 aa, Homo sapiens
ASAEFEMAGGKAGKDSGKAKTKAVSRSQRAGLQFPVGRIHRHLKSRTTSHGRVGATAAVYSAAILEYLTAEVLELAGNASKDLKVKRITPRHLQLAIRGDEELDSLIKATIAGGGVIPHIHKSLIGKKGQQKTV

SEQ ID NO: 1023 - protein, 226 aa, Homo sapiens
  SITE (33): Xaa equals any of the naturally occurring L-amino acids
  SITE (42): Xaa equals any of the naturally occurring L-amino acids
  SITE (67): Xaa equals any of the naturally occurring L-amino acids
GLFQTCIHLLTLPVLVHGELFAPPRWLRRAAGXPWTLVTSCXSLRPSGPCPRPGRALLPSCAPAARXPWGGVVWCWEGVLQGEEDLEGLGAAVLNRLTLRRPLSAALLFITVPHSGRRSPVAGQVPMACSLEPDFRCFGIRSPQHRQVHPIITLPVPGWAGDSGTVMPGARTAALPLHTDGLGVALRPHPTLISGRGSPEWSLVRAVAKPAVSFLHKVPPPLSVSG

SEQ ID NO: 1024 - protein, 760 aa, Homo sapiens
  SITE (330): Xaa equals any of the naturally occurring L-amino acids
QGKKRAGNFAIMEIQCPALRKTLPILFGSLRRCLCLSDKYSQACHPLGSKVRRCRKPGPRDRQLTRVDKSPEMWCIVLFSLLAWVYAEPTMYGEILSPNYPQAYPSEVEKSWDIEVPEGYGIHLYFTHLDIELSENCAYDSVQIISGDTEEGRLCGQRSSNNPHSPIVEEFQVPYNKLQVIFKSDFSNEERFTGFAAYYVATDINECTDFVDVPCSHFCNNFIGGYFCSCPPEYFLHDDMKNCGVNCSGDVFTALIGEIASPNYPKPYPENSRCEYQIRLEKGFQVVVTLRREDFDVEAADSAGNCLDSLVFVAGDRQFGPYCGHGFPGXLNIETKSNALDIIFQTDLTGQKKGWKLRYHGDPMPCPKEDTPNSVWEPAKAKYVFRDVVQITCLDGFEVVEGRVGATSFYSTCQSNGKWSNSKLKCQPVDCGIPESIENGKVEDPESTLFGSVIRYTCEEPYYYMENGGGGEYHCAGNGSWVNEVLGPELPKCVPVCGVPREPFEEKQRIIGGSDADIKNFPWQVFFDNPWAGGALINEYWVLTAAHVVEGNREPTMYVGSTSVQTSRLAKSKMLTPEHVFIHPGWKLLEVPEGRTNFDNDIALVRLKDPVKMGPTVSPICLPGTSSDYNLMDGDLGLISGWGRTEKRDRAVRLKAARLPVAPLRKCKEVKVEKPTADAEAYVFTPNMICAGGEKGMDSCKGDSGGAFAVQDPNDKTKFYAAGLVSWGPQCGTYGLYTRVKNYVDWIMKTMQENSTPRED

SEQ ID NO: 1025 - protein, 216 aa, Homo sapiens
  SITE (115): Xaa equals any of the naturally occurring L-amino acids
  SITE (139): Xaa equals any of the naturally occurring L-amino acids
GGGRLRRRRSGSPGWRAPRTGMLLGLAAMELKVWVDGIQRVVCGVSEQTTCQEVVIALAQAIGQTGRFVLVQRLREKERQLLPQECPVGAQATCGQFASDVQFVLRRTGPSLAGXPSSDSCPPPERCLIRASLPVKPRXALGCEPRKTLTPEPAPSLSRPGPAACEHPHQAAAQTCGAWSSGCRGMLRSWAMRPSGSKSCAGSRPGSERDRHACRH

SEQ ID NO: 1026 - protein, 604 aa, Homo sapiens
  SITE (303): Xaa equals any of the naturally occurring L-amino acids
  SITE (359): Xaa equals any of the naturally occurring L-amino acids
GTSSDILKGNFSIRTAKMQQHVCETIIRIFKRHGAVQLCTPLLLPRNRQIYEHNEAALFMDHSGMLVMLPFDLRIPFARYVARNNILNLKRYCIERVFRPRKLDRFHPKELLECAFDIVTSTTNSFLPTAEIIYTIYEIIQEFPALQERNYSIYLNHTMLLKAILLHCGIPEDKLSQVYIILYDAVTEKLTRREVEAKFCNLSLSSNSLCRLYKFIEQKGDLQDLMPTINSLIKQKTGIAQLVKYGLKDLEEVVGLLKKLGIKLQVLINLGLVYKVQQHNGIIFQFVAFIKRRQRAVPEILAXGGRYDLLIPQFRGPQALGPVPTAIGVSIAIDKISAAVLNMEESVTISSCDLLVVSXGQMSMSRAINLTQKLWTAGITAEIMYDWSQSQEELQEYCRHHEITYVALVSDKEGSHVKVKSFEKERQTEKRVLETELVDHVLQKLRTKVTDERNGREASDNLAVQNLKGSFSNASGLFEIHGATVVPIVSVLAPEKLSASTRRRYETQVQTRLQTSLANLHQKSSEIEILAVDLPKETILQFLSLEWDADEQAFNTTVKQLLSRLPKQRYLKLVCDEIYNIKVEKKVSVLFLYSYRDDYYRILF

SEQ ID NO: 1027 - protein, 459 aa, Homo sapiens
  SITE (27): Xaa equals any of the naturally occurring L-amino acids
TSCGINTKFTSKEPIFLTQLLHFSNLXQEYKINSRLLQNILDAGFQMPTPIQMQAIPVMLHGRELLASAPTGSGKTLAFSIPILMQLKQPANKGFRALIISPTRELASQIHRELIKISEGTGFRIHMIHKAAVAAKKFGPKSSKKFDILVTTPNRLIYLLKQDPPGIDLASVEWLVVDESDKLFEDGKTGFRDQLASIFLACTSHKVRRAMFSATFAYDVEQWCKLNLDNVISVSIGARNSAVETVEQELLFVGSETGKLLAVRELVKKGFNPPVLVFVQSIERAKELFHELIYEGINVDVIHAERTQQQRDNTVHSFRAGKIWVLICTALLARGIDFKGVNLVINYDFPTSSVEYIHRIGRTGRAGNKGKAITFFTEDDKPLLRSVANVIQQAGCPVPEYIKGFQKLLSKQKKKMIKKPLERESISTTPKCFLEKAKDKQKKVTGQNSKKKVALEDKS

SEQ ID NO: 1028 - protein, 68 aa, Homo sapiens
QRGFYANALTSALGNERVTSASSLASFLVLERLTNVCHSHKCFELDLCDLCFFSFSLESEYHCLPPRS

SEQ ID NO: 1029 - protein, 215 aa, Homo sapiens [sequence omitted]

SEQ ID NO: 1030 - protein, 297 aa, Homo sapiens
KVRLQVPVRNSRVDPRVRPRVRPRVRWTAAMRLTVLCAVCLLPGSLALPLPQEAGGMSELQWEQAQDYLKRFYLYDSETKNANSLEAKLKEMQKFFGLPITGMLNSRVIEIMQKPRCGVPDVAEYSLFPNSPKWTSKVVTYRIVSYTRDLPHITVDRLVSKALNMWGKEIPLHFRKVVWGTADIMIGFARGAHGDSYPFDGPGNTLAHAFAPGTGLGGDAHFDEDERWTDGSSLGINFLYAATHELGHSLGMGHSSDPNAVMYPTYGNGDPQNFKLSQDDIKGIQKLYGKRSNSRKK

SEQ ID NO: 1031 - protein, 571 aa, Homo sapiens
  SITE (44): Xaa equals any of the naturally occurring L-amino acids
  SITE (81): Xaa equals any of the naturally occurring L-amino acids
  SITE (484): Xaa equals any of the naturally occurring L-amino acids
RVRSKVPRCVNTQPGFHCLPCPPRYRGNQPVGVGLEAAKTEKQXCEPENPCKDKTHNCHKHAECIYLGHFSDPMYKCECQXGYAGDGLICGEDSDLDGWPNLNLVCATNATYHCIKDNCPHLPNSGQEDFDKDGIGDACDDDDDNDGVTDEKDNCQLLFNPRQADYDKDEVGDRCDNCPYVHNPAQIDTDNNGEGDACSVDIDGDDVFNERDNCPYVYNTDQRDTDGDGVGDHCDNCPLVHNPDQTDVDNDLVGDQCDNNEDIDDDGHQNNQDNCPYISNANQADHDRDGQGDACDPDDDNDGVPDDRDNCRLVFNPDQEDLDGDGRGDICKDDFDNDNIPDIDDVCPENNAISETDFRNFQMVPLDPKGTTQIDPNWVIRHQGKELVQTANSDPGIAVGFDEFGSVDFSGTFYVNTDRDDDYAGFVFGYQSSSRFYVVMWKQVTQTYWEDQPTRAYGYSGVSLKVVNSTTGTGEHLRNALWHXGNTPGQVRTLWHDPRNIGWKDYTAYRWHLTHRPKTGYIRVLVHEGKQVMADSGPIYDQTYAGGRLGLFVFSQEMVYFSDLKYECRDI

SEQ ID NO: 1032 - protein, 114 aa, Homo sapiens
GRGTATFPTGHEFVGPCLGRAEAFWRSKMGRKDAATIKLPVDQYRKQIGKQDYKKTKPILRATKLKAEAKKTAIGIKEVGLVLAAILALLLAFYAFFYLRLTTDVDPDLDQDED

SEQ ID NO: 1033 - protein, 243 aa, Homo sapiens
  SITE (88): Xaa equals any of the naturally occurring L-amino acids
  SITE (101): Xaa equals any of the naturally occurring L-amino acids
HRRDEALQSLRFRRRPGAQAADACGPRADLGGPREPAAGGRAAWHRPAARGQSPRRCHAGVHRSQCHLCRLGAAERFRGIVALLASRXLLRPPLHWVLLAXALVNLLLSVACSLGLLLAVSLTVANGGRRLIADCHPGLLDPLVPLDEGPGHTDCPFDPTRIYDTALALWIPSLLMSAGEAALSGYCCVAALTLRGVGPCRKDGLQGQLEEMTELESPKCKRQENEQLLDQNQEIRASQRSWV

SEQ ID NO: 1034 - protein, 173 aa, Homo sapiens
YTWHSEKMDLKDKNGGPGRCNSHRLKVSSGLCKTHEIGFDPLALKCPLRSRTAPWWPLDRVSFDLHHLVIGNFFVGNRKIFLDYLVYGFAHNNRWKLLVQSWSDGCVHRTFGLVKSFSKASFCIFITKQRKSSEDLALKQICANTARVILKLKHFHFVSYMCTFLFTCENGHL

SEQ ID NO: 1035 - protein, 241 aa, Homo sapiens
SFSEMAGVSACIKYSMFTFNFLFWLCGILILALAIWVRVSNDSQAIFGSEDVGSSSYVAVDILIAVGAIIMILGFLGCCGAIKESRCMLLLFFIGLLLILLLQVATGILGAVFKSKSDRIVNETLYENTKLLSATGESEKQFQEAIIVFQEEFKCCGLVNGAADWGNNFQHYPELCACLDKQRPCQSYNGKQVYKETCISFIKDFLAKNLIIVIGISFGLAVIEILGLVFSMVLYCQIGNK

SEQ ID NO: 1036 - protein, 335 aa, Homo sapiens
  SITE (3): Xaa equals any of the naturally occurring L-amino acids
PTXGRAEEAKMAAAAASLRGVVLGPRGAGLPGARARGLLCSARPGQLPLRTPQAVALSSKSGLSRGRKVMLSALGMLAAGGAGLAVALHSAVSASDLELHPPSYPWSHRGLLSSLDHTSIRRGFQVYKQVCASCHSMDFVAYRHLVGVCYTEDEAKELAAEVEVQDGPNEDGEMFMRPGKLFDYFPKPYPNSEAARAANNGALPPDLSYIVRARHGGEDYVFSLLTGYCEPPTGVSLREGLYFNPYFPGQAIAMAPPIYTDVLEFDDGTPATMSQIAKDVCTFLRWASEPEHDHRKRMGLKMLMMMALLVPLVYTIKRHKWSVLKSRKLAYRPPK

SEQ ID NO: 1037 - protein, 511 aa, Homo sapiens
HQLQGPLPLRALPWHSSRSRVTCTRCFSWMHPSPMHPLRAGSKSQGSRSPAPSPMRAANRSHSAGRTPGRTPGKSSSKVQTTPSKPGGDRYIPHRSAAQMEVASFLLSKENQPENSQTPTKKEHQKAWALNLNGFDVEEAKILRLSGKPQNAPEGYQNRLKVLYSQKATPGSSRKTCRYIPSLPDRILDAPEIRNDYYLNLVDWSSGNVLAVALDNSVYLWSASSGDILQLLQMEQPGEYISSVAWIKEGNYLAVGTSSAEVQLWDVQQQKRLRNMTSHSARVGSLSWNSYILSSGSRSGHIHHHDVRVAEHHVATLSGHSQEVCGLRWAPDGRHLASGGNDNLVNVWPSAPGEGGWVPLQTFTQHQGAVKAVAWCPWQSNVLATGGGTSDRHIRIWNVCSGACLSAVDAHSQVCSILWSPHYKELISGHGFAQNQLVIWKYPTMAKVAELKGHTSRVLSLTMSPDGATVASAAADETLRLWRCFELDPARRREREKASAAKSSLIHQGIR

SEQ ID NO: 1038 - protein, 209 aa, Homo sapiens
HEPPSASSVAGDLGRGTRTEVEARAARPGAESAPAAAMPDSWDKDVYPEPPRRTPVQPNPIVYMMKAFDLIVDRPVTLVREFIERQHAKNRYYYYHRQYRRVPDITECKEEDIMCMYEAEMQWKRDYKVDQEIINIMQDRLKACQQREGQNYQQNCIKEVEQFTQVAKAYQDRYQDLGAYSSARKCLAKQRQRMLQERKAAKEAAAATS

SEQ ID NO: 1039 - protein, 219 aa, Homo sapiens
  SITE (153): Xaa equals any of the naturally occurring L-amino acids
LAAPDLSKPRGYHWDTSDWMPSVPLPDIQEFPNYEVIDEQTPLYSADPNAIDTDYYPGGYDIESDFPPPPEDFPAADELPPLPPEFSNQFESIHPPRDMPAAGSLGSSSRNRQRFNLNQYLPNFYPLDMSEPQTKGTGENSTCREPHAPYPPXYQRHFEAPAVESMPMSVYASTASCSDVSACCEVESEVMMSDYESGDDGHFEEVTIPPLDSQQHTEV

SEQ ID NO: 1040 - protein, 178 aa, Homo sapiens
  SITE (11): Xaa equals any of the naturally occurring L-amino acids
FDLPYRAEFGXPGPPLSAACSWKFRLGCLLGAMESDFYLRYYVGHKGKFGHEFLEFEFRPDGKLRYANNSNYKNDVMIRKEAYVHKSVMEELKRIIDDSEITKEDDALWPPPDRVGRQELEIVIGDEHISFTTSKIGSLIDVNQSKDPEGLRVFYYLVQDLKCLVFSLIGLHFKIKPI

SEQ ID NO: 1041 - protein, 121 aa, Homo sapiens
LVPNSARAGASYAAAAVTMAHYKAADSKREQFRRYLEKSGVLDTLTKVLVALYEEPEKPNSALDFLKHHLGAATPENPEIELLRLELAEMKEKYEAIVEENKKLKAKLAQYEPPQEEKRAE

SEQ ID NO: 1042 - protein, 253 aa, Homo sapiens
VDPRVRPRSVNGELQKAIDLFTDAIKLNPRLAILYAKRASVFVKLQKPNAAIRDCDRAIEINPDSAQPYKWRGKAHRLLGHWEEAAHDLALACKLDYDEDASAMLKEVQPRAQKIAEHRRKYERKREEREIKERIERVKKAREEHERAQREEEARRQSGAQYGSFPGGFPGGMPGNFPGGMPGMGGGMPGMAGMPGLNEILSDPEVLAAMQDPEVMVAFQDVAQNPANMSKYQSNPKVMNLISKLSAKFGGQA

SEQ ID NO: 1043 - protein, 343 aa, Homo sapiens
MKTCQEEKLMGHLGVVLYEYLGEEYPEVLGSILGALKAIVNVIGMHKMTPPIKDLLPRLTPILKNRHEKVQENCIDLVGRIADRGAEYVSAREWMRICFELLELLKAHKKAIRRATVNTFGYIAKAIGPHDVLATLLNNLKVQERQNRVCTTVAIAIVAETCSPFTVLPALMNEYRVPELNVQNGVLKSLSFLFEYIGEMGKDYIYAVTPLLEDALMDRDLVHRQTASAVVQHMSLGVYGFGCEDSLNHLLNYVWPNVFETSPHVIQAVMGALEGLRVAIGPCRMLQYCLQGLFHPARKVRDVYWKIYNSIYIGSQDALIAHYPRIYNDDKNTYIRYELDYIL

SEQ ID NO: 1044 - protein, 268 aa, Homo sapiens
  SITE (20): Xaa equals any of the naturally occurring L-amino acids
LRRPYARYNGLYRSGIRGRXNLESTRVRELPGGAMSCINLPTVLPGSPSKTRGQIQVILGPMFSGKSTELMRRVRRFQIAQYKCLVIKYAKDTRYSSSFCTHDRNTMEALPACLLRDVAQEALGVAVIGIDEGQFFPDIVEFCEAMANAGKTVIVAALDGTFQRKPFGAILNLVPLAESVVKLTAVCMECFREAAYTKRLGTEKEVEVIGGADKYHSVCRLCYFKKASGQPAGPDNKENCPVPGKPGEAVAARKLFAPQQILQCSPAN

SEQ ID NO: 1045 - protein, 139 aa, Homo sapiens
  SITE (128): Xaa equals any of the naturally occurring L-amino acids
PGQSRWQGPPLPLCQAGSAKSGEPGAGGKAGDSPALPPPPLGAQQLLRKVWHPWRGGAPGWAGSRWPGAWRCAAGACMAPRGTQAEESPFVGNPGNITGARGLTGTLRCQLQVQGEPPEVHWLRDGQXLELADSTQTQV

SEQ ID NO: 1046 - protein, 416 aa, Homo sapiens
SPSERLQRGREEQPAGGGGESVSSWEEQNRGGAPAGAGGGPTMAIRKKSTKSPPVLSHEFVLQNHADIVSCVAMVFLLGLMFEITAKASIIFVTLQYNVTLPATEEQATESVSLYYYGIKDLATVFFYMLVAIIIHAVIQEYMLDKINRRMHFSKTKHSKFNESGQLSAFYLFACVWGTFILISENYISDPTILWRAYPHNLMTFQMKFFYISQLAYWLHAFPELYFQKTKKEDIPRQLVYIGLYLFHIAGAYLLNLNHLGLVLLVLHYFVEFLFHISRLFYFSNEKYQKGFSLWAVLFVLGRLLTLILSVLTVGFGLARAENQKLDFSTGNFNVLAVRIAVLASICVTQAFMMWKFINFQLRRWREHSAFQAPAVKKKPTVTKGRSSKKGTENGVNGTLTSNVADSPRNKKEKSS

SEQ ID NO: 1047 - protein, 466 aa, Homo sapiens
PASSGLLPLSRSNLYSGRTGIPRAPPALAALATAPGRRAPVHTGSLLGTNSSTMGLAWGLGVLFLMHVCGTNRIPESGGDNSVFDIFELTGAARKGSGRRLVKGPDPSSPAFRIEDANLIPPVPDDKFQDLVDAVRAEKGFLLLASLRQMKKTRGTLLALERKDHSGQVFSVVSNGKAGTLDLSLTVQGKQHVVSVEEALLATGQWKSITLFVQEDRAQLYIDCEKMENAELDVPIQSVFTRDLASIARLRIAKGGVNDNFQGVLQNVRFVFGTTPEDILRNKGCSSSTSVLLTLDNNVVNGSSPAIRTNYIGHKTKDLQAICGISCDELSSMVLELRGLRTIVTTLQDSIRKVTEENKELANELRRPPLCYHNGVQYRNNEEWTVDSCTECHCQNSVTICKKVSCPIMPCSNATVPDGECCPRCWPSDSADDGWSPWSEWTSCSTSCGNGIQQRGRSCDSAQQPM

SEQ ID NO: 1048 - protein, 217 aa, Homo sapiens
  SITE (122): Xaa equals any of the naturally occurring L-amino acids
  SITE (186): Xaa equals any of the naturally occurring L-amino acids
  SITE (200): Xaa equals any of the naturally occurring L-amino acids
DPRVRQSHISDTSVVVKLDNSRDLNMDCIIAEIKAQYDDIVTRSRAEAESWYRSKCEEMKATVIRHGETLRRTKEEINELNRMIQRLTAEVENAKCQNSKLEAAVAQSEQQGEAALSDARCXLAELEGALQKAKQDMACLIREYQEVMNSKLGLDIEIATYRRLLEGEEQRLCEGIGAVNVCVSSXRGGVVCGDLCVSGXRPVTAVSAALRATGTWR

SEQ ID NO: 1049 - protein, 406 aa, Homo sapiens
GSAAARYLSATWRNWISLPPAGLPATAGLRHSGSLMAATCEISNIFSNYFSAMYSSEDSTLASVPPAATFGADDLVLTLSNPQMSLEGTEKASWLGEQPQFWSKTQVLDWISYQVEKNKYDASAIDFSRCDMDGATLCNCALEELRLVFGPLGDQLHAQLRDLTSSSSDELSWIIELLEKDGMAFQEALDPGPFDQGSPFAQELLDDGQQASPYHPGSCGAGAPSPGSSDVSTAGTGASRSSHSSDSGGSDVDLDPTDGKLFPSDGFRDCKKGDPKHGKRKRGRPRKLSKEYWDCLEGKKSKHAPRGTHLWEFIRDILIHPELNEGLMKWENRHEGVFKFLRSEAVAQLWGQKKKNSNMTYEKLSRAMRYYYKREILERVDGRRLVYKFGKNSSGWKEEEVLQSRN

SEQ ID NO: 1050 - protein, 251 aa, Homo sapiens
  SITE (53): Xaa equals any of the naturally occurring L-amino acids
  SITE (86): Xaa equals any of the naturally occurring L-amino acids
RPALDTCCPFPARILGSFPLSQHLGPAFDTTPRLPTLRAWSLPQGPLSWAMAXKGVLGPGQLGAVAILLYLGLLRSGTGAEGAEAXCGVAPQARITGGSSAVAGQWPWQVSITYEGVHVCGGSLVSEQWVLSAAHCFPSEHHKEAYEVKLGAHQLDSYSEDAKVSTLKDIIPHPSYLQEGSQGDIALLQLSRPITFSRYIRPICLPAANASFPNGLHCTVTGWGHVAPSVSLLTPKPLQQLEVPLISRETW

SEQ ID NO: 1051 - protein, 171 aa, Homo sapiens
HYRRYACRYRSGIRGRVDIRRRSSRRPREPPGPSRRRRRRRPDPRTMPSEKTFKQRRTFEQRVEDVRLIREQHPTKIPVIIERYKGEKQLPVLDKTKFLVPDHVNMSELIKIIRRRLQLNANQAFFLLVNGHSMVSVSTPISEVYESEKDEDGFLYMVYASQETFGMKLSV

SEQ ID NO: 1052 - protein, 189 aa, Homo sapiens
GGPTCSARCEPVRPPPAPEQPASLHRLLSVLSPRAAIAVMLGAALRRCAVAATTRADPRGLLHSARTPGPAVAIQSVRCYSHGSQETDEEFDARWVTYFNKPDIDAWELRKGINTLVTYDMVPEPKIIDAALRACRRLNDFASTVRILEVVKDKAGPHKEIYPYVIQELRPTLNELGISTPEELGLDKV

SEQ ID NO: 1053 - protein, 315 aa, Homo sapiens
RHSASPRCRLPPTEPVSGLRASGEMLLPLLLLLPMCWAVEVKRPRGVSLTNHHFYDESKPFTCLDGSATIPFDQVNDDYCDCKDGSDEPGTAACPNGSFHCTNTGYKPLYIPSNRVNDGVCDCCDGTDEYNSGVICENTCKEKGRKERESLQQMAEVTREGFRLKKILIEDWKKAREEKQKKLIELQAGKKSLEDQVEMLRTVKEEAEKPEREAKEQHQKLWEEQLAAAKAQQEQELAADAFKELDDDMDGTVSVTELQTHPELDTDGDGALSEAEAQALLSGDTQTDATSFYDRVWGPGGAGPHSQAPTAFKDG

SEQ ID NO: 1054 - protein, 138 aa, Homo sapiens
VWKVIVWSHSSLITLLGILEEKGSKTYTHTPTQSNSVFKQIPRILGPGLNKAGKFPSLLTHNENMVAKVDEVKSTIKFQMKKVLCLAVAVGHVKMTDDELVYNIHLAVNFLVSLLKKNWQNVRALYIKSTMGKPQRLY

SEQ ID NO: 1055 - protein, 243 aa, Homo sapiens
GTREEAGVDLVSPTPLTPPDPGAASATATAPAPAAARRGEAMAKVSVLNVAVLENPSPFHSPFRFEISFECSEALADDLEWKIIYVGSAESEEFDQILDSVLVGPVPAGRHMFVFQADAPNPSLIPETDAVGVTVVLITCTYHGQEFIRVGYYVNNEYLNPELRENPPMKPDFSQLQRNILASNPRVTRFHINWDNNMDRLEAIETQDPSLGCGLPLNCTPIKGLGLPGCIPGLLPENSMDCI

SEQ ID NO: 1056 - protein, 211 aa, Homo sapiens
  SITE (8): Xaa equals any of the naturally occurring L-amino acids
HEPRRLLXDAEGPEETVRLWPAARAAMDAAEVEFLAEKELVTIIPNFSLDKIYLIGGDLGPFNPGLPVEVPLWLAINLKQRQKCRLLPPEWMDVEKLEKMRDHERKEETFTPMPSPYYMELTKLLLNHASDNIPKADEIRTLVKDMWDTRIAKLRVSADSFVRQQEAHAKLDNLTLMEINTSGTFLTQALNHMYKLRTNLQPLESTQSQDF

SEQ ID NO: 1057 - protein, 407 aa, Homo sapiens
  SITE (343): Xaa equals any of the naturally occurring L-amino acids
VILGAGLRDKDMWIPVVGLPRRLRLSALAGAGRFCILGSEAATRKHLPARNHCGLSDSSPQLWPEPDFRNPPRKASKASLDFKRYVTDRRLAETLAQIYLGKPSRPPHLLLECNPGPGILTQALLEAGAKVVALESDKTFIPHLESLGKNLDGKLRVIHCDFFKLDPRSGGVIKPPAMSSRGLFKNLGIEAVPWTADIPLKVVGMFPSRGEKRALWKLAYDLYSCTSIYKFGRIEVNMFIGEKEFQKLMADPGNPDLYHVLSVIWQLACEIKVLHMEPWSSFDIYTRKGPLENPKRRELLDQLQQKLYLIQMIPRQNLFTKNLTPMNYNIFFHLLKHCFGRRXATVIDHLRSLTPLDARDILMQIGKQEDEKVVNMHPQDFKTLFETIERSKDCAYKWLYDETLEDR

SEQ ID NO: 1058 - protein, 89 aa, Homo sapiens
SSWVGGSLRQAATLEGEQGSAVSAASHARSDLSLGTPQEPEDSSGQCRWGVGGESGREALRAPSPTTNLALVVIFRQNFVVFFPFYDGF

SEQ ID NO: 1059 - protein, 457 aa, Homo sapiens
GTRPSSCSQTEAQPPSPVSITSAASMSDKLPYKVADIGLAAWGRKALDIAENEMPGLMRMRERYSASKPLKGARIAGCLHMTVETAVLIETLVTLGAEVQWSSCNIFSTQDHAAAAIAKAGIPVYAWKGETDEEYLWCIEQTLYFKDGPLNMILDDGGDLTNLIHTKYPQLLPGIRGISEETTTGVHNLYKMMANGILKVPAINVNDSVTKSKFDNLYGCRESLIDGIKRATDVMIAGKVAVVAGYGDVGKGCAQALRGFGARVIITEIDPINALQAAMEGYEVTTMDEACQEGNIFVTTTGCIDIILGRHFEQMKDDAIVCNIGHFDVEIDVKWLNENAVEKVNIKPQVDRYRLKNGRRIILLAEGRLVNLGCAMGHPSFVMSNSFTNQVMAQIELWTHPDKYPVGVHFLPKKLDEAVAEAHLGKLNVKLTKLTEKQAQYLGMSCDGPFKPDHYRY

SEQ ID NO: 1060 - protein, 511 aa, Homo sapiens
EGVMADGQVAELLLRRLEASDGGLDSAELAAELGMEHQAVVGAVKSLQALGEVIEAELRSTKHWELTAEGEEIAREGSHEARVFRSIPPEGLAQSELMRLPSGKVGFSKAMSNKWIRVDKSAADGPRVFRVVDSMEDEVQRRLQLVRGGQAEKLGEKERSELRKRKLLAEVTLKTYWVSKGSAFSTSISKQETELSPEMISSGSWRDRPFKPYNFLAHGVLPDSGHLHPLLKVRSQFRQIFLEMGFTEMPTDNFIESSFWNFDALFQPQQHPARDQHDTFFLRDPAEALQLPMDYVQRVKRTHSQGGYGSQGYKYNWKLDEARKNLLRTHTTSASARALYRLAQKKPFTPVKYFSIDRVFRNETLDATHLAEFHQIEGVVADHGLTLGHLMGVLREFFTKLGITQLRFKPAYNPYTEPSMEVFSYHQGLKKWVEVGNSGVFRPEMLLPMGLPENVSVIAWGLSLERPTMIKYGINNIRELVGHKVNLQMVYDSPLCRLDAEPRPPPTQEAA

SEQ ID NO: 1061 - protein, 228 aa, Homo sapiens
RAASTPRAAPGAALLSPPGLRAAPAALVMGEGTCEKRRDAEYGASPEQVADNGDDHSEGGLVENHVDSTMNMLGGGGSAGRKPLKSGMKELAVFREKVTEQHRQMGKGGKHHLGLEEPKKLRPPPARTPCQQELDQVLERISTMRLPDERGPLEHLYSLHIPNCDKHGLYNLKQCKMSLNGQRGECWCVNPNTGKLIQGAPTIRGDPECHLFYNEQQEARGVHTQRMQ

SEQ ID NO: 1062 - protein, 324 aa, Homo sapiens
PRVMAMATKGGTVKAASGFNAMEDAQTLRKAMKGLGTDEDAIISVLAYRNTAQRQEIRTAYKSTIGRDLIDDLKSELSGNFEQVIVGMMTPTVLYDVQELRRAMKGAGTDEGCLIEILASRTPEEIRRISQTYQQQYGRSLEDDIRSDTSFMFQRVLVSLSAGGRDEGNYLDDALVRQDAQDLYEAGEKKWGTDEVKFLTVLCSRNRNHLLHVFDEYKRISQKDIEQSIKSETSGSFEDALLAIVKCMRNKSAYFAEKLYKSMKGLGTDDNTLIRVMVSRAEIDMLDIRAHFKRLYGKSLYSFIKGDTSGDYRKVLLVLCGGDD

SEQ ID NO: 1063 - protein, 355 aa, Homo sapiens
  SITE (1): Xaa equals any of the naturally occurring L-amino acids
  SITE (3): Xaa equals any of the naturally occurring L-amino acids
  SITE (37): Xaa equals any of the naturally occurring L-amino acids
XYXIPGSTHASGKILGSGISSSSVLHGMVFKKETEVXVTSVKDAKIAVYSCPFDGMITETKGTVLIKTAEELMNFSKGEENLMDAQVKAIADTGANVVVTGGKVADMALHYANKYNIMLVRLNSKWDLRRLCKTVGATALPRLTPPVLEEMGHCDSVYLSEVGDTQVVVFKHEKEDGAISTIVLRGSTDNLMDDIERAVDDGVNTFKVLTRDKRLVPGGGATEIELAKQITSYGETCPGLEQYAIKKFAEAFEAIPRALAENSGVKANEVISKLYAVHQEGNKNVGLDIEAEVPAVKDMLEAGILDTYLGKYWAIKLATNAAVTVLRVDQIIMAKPAGGPKPPSGKKDWDDDQND

SEQ ID NO: 1064 - protein, 113 aa, Homo sapiens
SPFTLHCCHSTLYDGRTGSSRENCTVTTVFFTLFQGSLSPDIEEISFRPETQRPHSPVIKPRFHSGPRSGAWPLLFGSHWEAHWPWIISSCTPGVLPACLLSWTAVCKKVTKT

SEQ ID NO: 1065 - protein, 634 aa, Homo sapiens
  SITE (325): Xaa equals any of the naturally occurring L-amino acids
VQGFESATFLGYFKSGLKYKKGGVASGFKHVVPNEVVVQRLFQVKGRRVVRATEVPVSWESFNNGDCFILDLGNNIHQWCGSNSNRYERLKATQVSKGIRDNERSGRARVHVSEEGTEPEAMLQVLGPKPALPAGTEDTAKEDAANRKLAKLYKVSNGAGTMSVSLVADENPFAQGALKSEDCFILDHGKDGKIFVWKGKQANTEERKAALKTASDFITKMDYPKQTQVSVLPEGGETPLFKQFFKNWRDPDQTDGLGLSYLSSHIANVERVPFDAATLHTSTAMAAQHGMDDDGTGQKQIWRIEGSNKVPVDPATYGQFYGGDXYIILYNYRHGGRQGQIIYNWQGAQSTQDEVAASAILTAQLDEELGGTPVQSRVVQGKEPAHLMSLFGGKPMIIYKGGTSREGGQTAPASTRLFQVRANSAGATRAVEVLPKAGALNSNDAFVLKTPSAAYLWVGTGASEAEKTGAQELLRVLRAQPVQVAEGSEPDGFWEALGGKAAYRTSPRLKDKKMDAHPPRLFACSNKIGRFVIEEVPGELMQEDLATDDVMLLDTWDQVFVWVGKDSQEEEKTEALTSAKRYIETDPANRDRRTPITVVKQGFEPPSFVGWFLGWDDDYWSVDPLDRAMAELAA

SEQ ID NO: 1066 - protein, 117 aa, Homo sapiens
RARGRCRRSPDGVGIEAPRKKVKYQEIQVEEPYYDCHECTETFTSSTAFSEHLKTHASMIIFEPANAFGECSGYIERASTSTGGANQADEKYFKCDVCGQLFNDRLSLARHQNTHTG

SEQ ID NO: 1067 - protein, 192 aa, Homo sapiens
PEQRGSSMAHGPGALMLKCVVVGDGAVGKTCLLMSYANDAFPESTCPPSSTTTQEDYDRLRPLSYPMTDVFLICFSVVNPASFQNVKEEWVPELKEYAPNVPFLLIGTQIDLRDDPKTLARLNDMKEKPICVEQGQKLAKEIGACCYVECSALTQKGLKTVFDEAIIAILTPKKHTVKKRIGSRCINCCLIT

SEQ ID NO: 1068 - protein, 360 aa, Homo sapiens
SRWARRDPQERRERGTRVQSSGTWIGAGAMGGEQEEERFDGMLLAMAQQHEGGVQELVNTFFSFLRRKTDFFIGGEEGMAEKLITQTFSHHNQLAQKTRREKRARQEAERREKAERAARLAKEAKSETSGPQIKELTDEEAERLQLEIDQKKDAENHEAQLKNGSLDSPGKQDTEEDEEEDEKDKGKLKPNLGNGADLPNYRWTQTLSELDLAVPFCVNFRLKGKDMVVDIQRRHLRVGLKGQPAIIDGELYNEVKVEESSWLIEDGKVVTVHLEKINKMEWWSRLVSSDPEINTKKINPENSKLSDLDSETRSMVEKMMYDQRQKSMGLPTSDEQKKQEILKKFMDQHPEMDFSKAKFN

SEQ ID NO: 1069 - protein, 174 aa, Homo sapiens
  SITE (52): Xaa equals any of the naturally occurring L-amino acids
VWLSWDQEKIPVLDQEAADGSSTLGGGAGTMGLSARYGPQFTLQHVPDYRQXVYIPGSNATLTNAAGKRGWQGPSRWQWQQEEVGQEGEEVTWRPGQEPQGGLSPTSPASPYLHPGLRVSGLTPRILVGAKAMLPLGNRNKCPVSTYPFPPRGLNMQKQFRWEPPSNQLLYPWG

SEQ ID NO: 1070 - protein, 445 aa, Homo sapiens
PRGLTGLWRSSLPIRKLQLPPDALKMATSLGSNTYNRQNWEDADFPILCQTCLGENPYIRMTKEKYGKECKICARPFTVFRWCPGVRMRFKKTEVCQTCSKLKNVCQTCLLDLEYGLPIQVRDAGLSFKDDMPKSDVNKEYYTQNMEREISNSDGTRPVGMLGKATSTSDMLLKLARTTPYYKRNRPHICSFWVKGECKRGEECPYRHEKPTDPDDPLADQNIKDRYYGINDPVADKLLKRASTMPRLDPPEDKTITTLYVGGLGDTITETDLRNHFYQFGEIRTITVVQRQQCAFIQFATRQAAEVAAEKSFNKLIVNGRRLNVKWGRSQAARGKEKEKDGTTDSGIKLEPVPGLPGALPPPPAAEEEASANYFNLPPSGPPAVVNIALPPPPGIAPPPPPGFGPHMFHPMGPPPPFMRAPGPIHYPSQDPQRMGAHAGKHSSP

SEQ ID NO: 1071 - protein, 346 aa, Homo sapiens
  SITE (286): Xaa equals any of the naturally occurring L-amino acids
  SITE (287): Xaa equals any of the naturally occurring L-amino acids
  SITE (291): Xaa equals any of the naturally occurring L-amino acids
  SITE (294): Xaa equals any of the naturally occurring L-amino acids
WSRLCLLKQYLFTMKLQSPEFQSLFTEGLKSLTELFVKENHELRIAGGAVRDLLNGVKPQDIDFATTATPTQMKEMFQSAGIRMINNRGEKHGTITARLHEENFEITTLRIDVTTDGRHAEVEFTTDWQKDAERRDLTINSMFLGFDGTLFDYFNGYEDLKNKKVRFVGHAKQRIQEDYLRILRYFRFYGRIVDKPGDHDPETLEAIAENAKGLAGISGERIWVELKKILVGNHVNHLIHLIYDLDVAPYIGLPANASLEEFDKVSKNVDGFSPKPVTLLASLFKXXDDVXKLXLRLKIAKEEKNLGLFIVKNRKDLIKATDSSDPLKPYQDFIIDSREPDAHSCM

SEQ ID NO: 1072 - protein, 404 aa, Homo sapiens
  SITE (77): Xaa equals any of the naturally occurring L-amino acids
  SITE (81): Xaa equals any of the naturally occurring L-amino acids
EDSLNLDLTPRMLRRLLERPCTLALLVGSQLAVMMYLSLGGFRSLSALFGRDQGPTFDYSHPRDVYSNLSHLPGAPXGPPXPQGLPYCPERSPLLVGPVSVSFSPVPSLAEIVERNPRVEPGGRYRPAGCEPRSRTAIIVPHRAREHHLRLLLYHLHPFLQRQQLAYGIYVIHQAGNGTFNRAKLLNVGVREALRDEEWDCLFLHDVDLLPENDHNLYVCDPRGPRHVAVAMNKFGYSLPYPQYFGGVSALTPDQYLKMNGFPNEYWGWGGEDDDIATRVRLAGMKISRPPTSVGHYKMVKHRGDKGNEENPHRFDLLVRTQNSWTQDGMNSLTYQLLARELGPLYTNITADIGTDPRGPRAPSGPRYPPGSSQAFRQEMLQRRPPARPGPLSTANHTALRGSH

SEQ ID NO: 1073 - protein, 217 aa, Homo sapiens
  SITE (68): Xaa equals any of the naturally occurring L-amino acids
NKEQLMDKSGIDSLDHVTSDAVELANRSDNSSDSSLFKTQCIPYSPKGEKRNPIRKFVRTPESVHASXSSSDSSFEPIPLTIKAIFERFKNRKKRYKKKKKRRYQPTGRPRGRPEGRRNPIYSLIDKKKQFRSRGSGFPFLESENEKNAPWRKILTFEQAVARGFFNYIEKLKYEHHLKESLKQMNVGEDLENEDFDSRRYKFLDDDGSISPIEEST

SEQ ID NO: 1074 - protein, 161 aa, Homo sapiens
  SITE (110): Xaa equals any of the naturally occurring L-amino acids
  SITE (122): Xaa equals any of the naturally occurring L-amino acids
  SITE (123): Xaa equals any of the naturally occurring L-amino acids
  SITE (125): Xaa equals any of the naturally occurring L-amino acids
  SITE (128): Xaa equals any of the naturally occurring L-amino acids
  SITE (147): Xaa equals any of the naturally occurring L-amino acids
THYRAKLVRLPGTGSGNSRVDPRVREQPSPASSAPGQLNSCQDVLPAEPAAVPTPTQVSLTQVSPKEPSTVSASSFLWLCPKLWGLWPSSEGGCFLNHHRRHHRCRRQRXNSCDRAVVSKAXXLXAAXFWGLLLIQILMLRQAIFGXNKNSQEAKNSPIWK

SEQ ID NO: 1075 - protein, 221 aa, Homo sapiens
SSSWHARYTVLTYLQTMVFYNLFIFLNNEDAVKDIRWLVISLLEDEQLEVREMAATTLSGLLQCNFLTMDSPMQIHFEQLCKTKLPKKRKRDPGSVGDTIPSAELVKRHAGVLGLGACVLSSPYDVPTWMPQLLMNLSAHLNDPQPIEMTVKKTLSNFRRLTMTTGRNINSNSLMTNCLFSPIFLCHHAIMHRKMTSPHFRLFSSKIPHPQVPSVVALCKF

SEQ ID NO: 1076 - protein, 166 aa, Homo sapiens
  SITE (56): Xaa equals any of the naturally occurring L-amino acids
  SITE (135): Xaa equals any of the naturally occurring L-amino acids
  SITE (163): Xaa equals any of the naturally occurring L-amino acids
  SITE (166): Xaa equals any of the naturally occurring L-amino acids
ARGARVRACASLGSWRGPRGEGWKMSMDVTFLGTGAAYPSPTRGASAVVLRCEGEXWLFDCGEGTQTQLMKSQLKAGRITKIFITHLHGDHFFGLPGLLCTISLQSGSMVSKQPIEIYGPVGFGTLSGEPWNSLXRELVFHYVVHELVPTADQCPAEGTKRIXACX

SEQ ID NO: 1077 - protein, 239 aa, Homo sapiens
  SITE (25): Xaa equals any of the naturally occurring L-amino acids
GLRALSQHTDLSPLSPKTPAPSMRXKMGNGTEEDYNFVFKVVLIGESGVGKTNLLSRFTRNEFSHDSRTTIGVEFSTRTVMLGTAAVKAQIWDTAGLERYRAITSAYYRGAVGALLVFDLTKHQTYAVVERWLKELYDHAEATIVVMLVGNKSDLSQAREVPTEEARMFAENNGLLFLETSALDSTNVELAFETVLKEIFAKVSKQRQNSIRTNAITSGSAQAGQEPGPGEKRACCISL

SEQ ID NO: 1078 - protein, 171 aa, Homo sapiens
  SITE (123): Xaa equals any of the naturally occurring L-amino acids
ILKGSSGSVWLRNLQLGLFGTALGLVGLWWAEGTAVATRGFFFGYTPAVWGVVLNQAFGGLLVAVVVKYADNILKGFATSLSIVLSTVASIRLFGFHVDPLFALGAGLVIGAVYLYSLPRGAXKAIASASASASGPCVHQQPPGQPPPPQLSSHRGDLITEPFLPKSVLVK

SEQ ID NO: 1079 - protein, 141 aa, Homo sapiens
  SITE (59): Xaa equals any of the naturally occurring L-amino acids
RRVCHSSPHLSSPRAACEQQAVALTLQEDRASLTLSGGPSALAFDLSKVPGPEAAPRLXALTLGLAKRVWSLERRLAAAEETAVSPRKSPRPAGPQLFLPDPDPQRGGPGPGVRRRCPGESLINPGFKSKKPAGGVDFDET

SEQ ID NO: 1080 - protein, 359 aa, Homo sapiens
  SITE (6): Xaa equals any of the naturally occurring L-amino acids
AVESRXPGWNHHGIQFPCGSVWLEHAIAMICGNVCLWKGAPTTSLISVAVTKIIAKVLEDNKLPGAICSLTCGGADIGTAMAKDERVNLLSFTGSTQVGKQVGLMVQERFGRSLLELGGNNAIIAFEDADLSLVVPSALFAAVGTAGQRCTTARRLFIHESIHDEVVNRLKKAYAQIRVGNPWDPNVLYGPLHTKQAVSMFLGAVEEAKKEGGTVVYGGKVMDRPGNYVEPTIVTGLGHDASIAHTETFAPILYVFKFKNEEEVFAWNNEVKQGLSSSIFTKDLGRIFRWLGPKGSDCGIVNVNIPTSGAEIGGAFGGEKHTGGGRESGSDAWKQYMRRSTCTINYSKDLPLAQGIKFQ

SEQ ID NO: 1081 - protein, 138 aa, Homo sapiens
AVPLLGRPTRPVGPRAALTMTQQGAALQNYNNELVKCIEELCQKREELCRQIQEEEDEKQRLQNEVRQLTEKLARVNENLARKIASRNEFDRTIAETEAAYLKILESSQTLLSVLKREAGNLTKATAPDQKSSGGRDS

SEQ ID NO: 1082 - protein, 339 aa, Homo sapiens
  SITE (42): Xaa equals any of the naturally occurring L-amino acids
SPISNCEITITDPGKFYNSNSVFSRGNMAKVFSFILVTTALXMGREISALEDCAQEQMRLRAQVRLLETRVKQQQVKIKQLLQENEVQFLDKGDENTVVDLGSKRQYADCSEIFNDGYKLSGFYKIKPLQSPAEFSVYCDMSDGGGWTVIQRRSDGSENFNRGWKDYENGFGNFVQKHGEYWLGNKNLHFLTTQEDYTLKIDLADFEKNSRYAQYKNFKVGDEKNFYELNIGEYSGTAGDSLAGNFHPEVQWWASHQRMKFSTWDRDHDNYEGNCAEEDQSGWWFNRCHSANLNGVYYSGPYTAKTDNGIVWYTWHGWWYSLKSVVMKIRPNDFIPNVI

SEQ ID NO: 1083 - protein, 256 aa, Homo sapiens
  SITE (56): Xaa equals any of the naturally occurring L-amino acids
KSLNGPADFEKRVEGGGRPRAPLVNALLTAPEFLIYTGCMVCVFLFCFSPPAGLFXGWGGGFAMSDDDSRASTSSSSSSSSNQQTEKETNTPKKKESKVSMSKNSKLLSTSAKRIQKELADITLDPPPNCSAGPKGDNIYEWRSTILGPPGSVYEGGVFFLDITFTPEYPFKPPKVTFRTRIYHCNINSQGVICLDILKDNWSPALTISKVLLSICSLLTDCNPADPLVGSIATQYMTNRAEHDRMARQWTKRYAT

SEQ ID NO: 1084 - protein, 176 aa, Homo sapiens
EKCVSFSAVLKSLSPVDPVEPISNSEPSMNSDMGKVSKNDTEEESNKSATTDNEISRTEYLCENSLEGKNKDNSSNEVFPQGAEERMCYQCESEDEPQADGSGLTTAPPTPRDSLQPSIKQRLARLQLSPDFTFTAGLAAEVAARSLSFTTMQEQTFGDEEEEQIIEENKNEIEEK

SEQ ID NO: 1085 - protein, 220 aa, Homo sapiens
HRKSRPANHCVYFYGDEISFSCHETSRFSAICQGDGTWSPRTPSCGDICNFPPKIAHGHYKQSSSYSFFKEEIIYECDKGYILVGQAKLSCSYSHWSAPAPQCKALCRKPELVNGRLSVDKDQYVEPENVTIQCDSGYGVVGPQSITCSGNRTWYPEVPKCEWETPEGCEQVLTGKRLMQCLPNPEDVKMALEVYKLSLEIEQLELQRDSARQSTLDKEL

SEQ ID NO: 1086 - protein, 133 aa, Homo sapiens
VKPSGGEGDVAQRPRDRLSSRLLGSPAWRRRLMTEGPLAGAPVCIFEGPGPPGGAGSYSWGLGFRRAGGGAGLKAALVYGVVTQSHWQRWGLAVAWQYLGIASTGNKDGHEQSKKKKKKKKKKKKKKKKKKKK

SEQ ID NO: 1087 - protein, 289 aa, Homo sapiens
ILTYKMKQDASRNAAYTVDCEDYVHVVEFNPFENGDSGNLIAYGGNNYVVIGTCTFQEEEADVEGIQYKTLRTFHHGVRVDGIAWSPETRLDSLPPVIKFCTSAADMKIRLFTSDLQDKNEYKVLEGHTDFINGLVFDPKEGQEIASVSDDHTCRIWNLEGVQTAHFVLHSPGMSVCWHPEETFKLMVAEKNGTIRFYDLLAQQAILSLESEQVPLMSAHWCLKNTFKVGAVAGNDWLIWDITRSSYPQNKRPVHMDRACLFRWSTISENLFATTGYPGKMQASFKFII

SEQ ID NO: 1088 - protein, 836 aa, Homo sapiens
  SITE (677): Xaa equals any of the naturally occurring L-amino acids
PTRPNWTGMTNLLDIPGLSSLSDTMIMDSIAAFLVLPNRLLVPLVPDLQDVAQLRSPLPRGIIRIHLLAARGLSSKDKYVKGLIEGKSDPYALVRLGTQTFCSRVIDEELNPQWGETYEVMVHEVPGQEIEVEVFDKDPDKDDFLGRMKLDVGKVLQASVLDDWFPLQGGQGQVHLRLEWLSLLSDAEKLEQVLQWNWGVSSRPDPPSAAILVVYLDRAQDLPLKKGNKEPNPMVQLSIQDVTQESKAVYSTNCPVWEEAFRFFLQDPQSQELDVQVKDDSRALTLGALTLPLARLLTAPELILDQWFQLSSSGPNSRLYMKLVMRILYLDSSEICFPTVPGCPGAWDVDSENPQRGSSVDAPPRPCHTTPDSQFGTEHVLRIHVLEAQDLIAKDRFLGGLVKGKSDPYVKLKLAGRSFRSHVVREDLNPRWNEVFEVIVTSVPGQELEVEVFDKDLDKDDFLGRCKVRLTTVLNSGFLDEWLTLEDVPSGRLHLRLERLTPRPTAAELEEVLQVNSLIQTQKSAELAAALLSIYMERAEDLPLRKGTKHLSPYATLTVGDSSHKTKTISQTSAPVWDESASFLIRKPHTESLELQVRGEGTGVLGSLSLPLSELLVADQLCLDRWFTLSSGQGQVLLRAQLGILVSQHSGVEAHSHSYSHSSSSLSEEPELSGGPXHITSSAPELRQRLTHVDSPLEAPAGPLGQVKLTLWYYSEERKLVSIVHGCRSLRQNGRDPPDPYVSLLLLPDKNRGTKRRTSQKKRTLSPEFNERFEWELPLDEAQRRKLDVSVKSNSSFMSRERELLGKVQLDLAETDLSQGVARWYDLMDNKDKGSS

SEQ ID NO: 1089 - protein, 409 aa, Homo sapiens
  SITE (17): Xaa equals any of the naturally occurring L-amino acids
  SITE (65): Xaa equals any of the naturally occurring L-amino acids
  SITE (393): Xaa equals any of the naturally occurring L-amino acids
  SITE (406): Xaa equals any of the naturally occurring L-amino acids
RSSVASVHTWRQRRQVXVFVLPSTANMKRPKLKKASKRMTCHKRYKIQKKVREHHRKLRKEAKKXGHKKPRKDPGVPNSAPFKEALLREAELRKQRLEELKQQQKLDRQKELEKKRKLETNPDIKPSNVEPMEKEFGLCKTENKAKSGKQNSKKLYCQELKKVIEASDVVLEVLDARDPLGCRCPQVEEAIVQSGQKKLVLILNKSDLVPKENLESWLNYLKKELPTVVFRASTKPKDKGKITKRVKAKKNAAPFRSEVCFGKEGLWKLLGGFQETCSKAIRVGVIGFPNVGKSSIINSLKQEQMCNVGVSMGLTRSMQVVPLDKQITIIDSPSFIVSPLNSSSALALRSPASIEVVKPMEAASAILSQADARQVVLKYTVPGYRNSLGIFYXACSEKRYAPKRWXPKC

SEQ ID NO: 1090 - protein, 161 aa, Homo sapiens
  SITE (5): Xaa equals any of the naturally occurring L-amino acids
  SITE (56): Xaa equals any of the naturally occurring L-amino acids
PKNWXTARADHHASMNWVPCGHSYFGATLNSFIHVLMYSYYGLSSVPSMRPYLWWXEVHHSGAAASVCADNHPDQLRGHLAVHIPSWLVVFPDWIHDFPDCSLHKLLHSDLQQERGLPKERPPEGPPEWVHGCCEWTHQQLFTPGKQCEAKEAAEGLKSKN

SEQ ID NO: 1091 - protein, 118 aa, Homo sapiens
SKNSAREEMAASSSSSSAGGVSGSSVTGSGFSVSDLAPPRKALFTYPKGAGEMLEDGSERFLCESVFSYQVASTLKQVKHDQQVARMEKLAGLVEELEADEWRFKPIEQLLGFTPSSG

SEQ ID NO: 1092 - protein, 198 aa, Homo sapiens
APFLAAGVSMGGMLLLNYLGKIGSKTPLMAAATFSVGWNTFACSESLEKPLNWLLFNYYLTTCLQSSVNKHRHMFVKQVDMDHVMKAKSIREFDKRFTSVMFGYQTIDDYYTDASPSPRLKSVGIPVLCLNSVDDVFSPSHAIPIETAKQNPNVALVLTSYGGHIGFLEGIWPRQSTYMDRVFKQFVQAMVEHGHELS

SEQ ID NO: 1093 - protein, 36 aa, Homo sapiens
PGWSRSPGWSRSPGWSRSPDVVIHPPRPPKMLGLQV

SEQ ID NO: 1094 - protein, 615 aa, Homo sapiens
  SITE (2): Xaa equals any of the naturally occurring L-amino acids
  SITE (21): Xaa equals any of the naturally occurring L-amino acids
  SITE (113): Xaa equals any of the naturally occurring L-amino acids
  SITE (132): Xaa equals any of the naturally occurring L-amino acids
  SITE (155): Xaa equals any of the naturally occurring L-amino acids
  SITE (156): Xaa equals any of the naturally occurring L-amino acids
  SITE (157): Xaa equals any of the naturally occurring L-amino acids
YXQLVLLQVPVRIPGSTHASXDAWVARQLAKPDNTLFVNRTLFDQVLEFLCSPDDDSRHSERQQVLLELLQAGGIVQFEESRLIRMAEKAEFYQICEFMYEREHQYDKIIDCXLRDPLREEEVFNYIHNILXIPGHSAEEKQSVWQKAMDHIEEXXXLKPCKAAELVATHFSGHIETVIKKLQNQVLLFKFLRSLLDPREGIHVNQELLQISPCITEQFIELLCQFNPTQVIETLQVLECYRLEETIQITQKYQLHEVTAYLLEKKGDIHGAFLIMLERLQSKLQEVTHQGENTKEDPSLKDVEDTMVETIALCQRNSHNLNQQQREALWFPLLEAMMAPQKLSSSAIPHLHSEALKSLTMQVLNSMAAFIALPSILQRILQDPVYGKGKLGEIQGLILGMLDTFNYEQTLLETTTSLLNQDLHWSLCNLRASVTRGLNPKQDYCSICLQQYKRRQEMADEIIVFSCGHLYHSFCLQNKECTVEFEGQTRWTCYKCSSSNKVGKLSENSSEIKKGRITPSQVKMSPSYHQSKGDPTAKKGTSEPVLDPQQIQAFDQLCRLYRGSSRLALLTELSQNRSSESYRPFSGSQSAPAFNSIFQNENFQLQLIPPPVTED

SEQ ID NO: 1095 - protein, 264 aa, Homo sapiens
  SITE (2): Xaa equals any of the naturally occurring L-amino acids
  SITE (27): Xaa equals any of the naturally occurring L-amino acids
WXSTTIWKAGPPAGTGPEFPGRPTRPXTRGFWFCSSVWVSSRLLKMNRLFGKAKPKAPPPSLTDCIGTVDSRAESIDKKISRLDAELVKYKDQIKKMREGPAKNMVKQKALRVLKQKRMYEQQRDNLAQQSFNMEQANYTIQSLKDTKTTVDAMKLGVKEMKKAYKQVKIDQIEDLQDQLEDMMEDANEIQEALSRSYGTPELDEDDLEAELDALGDELLADEDSSYLDEAASAPAIPEGVPTDTKNKDGVLVDEFGLPQIPAS

SEQ ID NO: 1096 - protein, 244 aa, Homo sapiens
SCCFLKRLQASFPRTAVSFEPLAGDMPRGRKSRRRRNARAAEENRNNRKIQASEASETPMAASVVASTPEDDLSGPEEDPSTPEEASTTPEEASSTAQAQKPSVPRSNFQGTKKSLLMSILALIFIMGNSAKEALVWKVLGKLGMQPGRQHSIFGDPKKIVTEEFVRRGYLIYKPVPRSSPVEYEFFWGPRAHVESSKLKVMHFVARVRNRCSKDWPCNYDWDSDDDAEVEAILNSGARGYSAP

SEQ ID NO: 1097 - protein, 132 aa, Homo sapiens
ATMVRMNVLADALKSINNAEKRGKRQVLIRPCSKVIVRFLTVMMKHGYIGEFEIIDDHRAGKIVVNLTGRLNKCGVISPRFDVQLKDLEKWQNNLLPSRQFGFIVLTTSAGIMDHEEARRKHTGGKILGFFF

SEQ ID NO: 1098 - protein, 371 aa, Homo sapiens
  SITE (44): Xaa equals any of the naturally occurring L-amino acids
  SITE (186): Xaa equals any of the naturally occurring L-amino acids
ARHTPAQRHDHPQEGNIPVCVQLAVCALPLPVVPGPEHCGPQRXLQPLVYPLAQVIIGCIKLIPTARFYPLRMHCIRALTLLSGSSGAFIPVLPFILEMFQQVDFNRKPGRMSSKPINFSVILKLSNVNLQEKAYRDGLVEQLYDLTLEYLHSQAHCIGFPELVLPVVLQLKSFLRECKVANYCRXVQQLLGKVQENSAYICSRRQRVSFGVSEQQAVEAWEKLTREEGTPLTLYYSHWRKLRDREIQLEISGKERLEDLNFPEIKRRKMADRKDEDRKQFKDLFDLNSSEEDDTEGFSERGILRPLSTRHGVEDDEEDEEEGEEDSSNSEGEWSWDGDPDAEAGLAPGELQQLAQGPEDELEDLQLSEDD

SEQ ID NO: 1099 - protein, 321 aa, Homo sapiens
ERTLGQPGFLGCPRQPHTAMHYPTALLFLILANGAQAFRICAFNAQRLTLAKVAREQVMDTLVRILARCDIMVLQEVVDSSGSAIPLLLRELNRFDGSGPYSTLSSPQLGRSTYMETYVYFYRSHKTQVLSSYVYNDEDDVFAREPFVAQFSLPSNVLPSLVLVPLHTTPKAVEKELNALYDVFLEVSQHWQSKDVILLGDFNADCASLTKKRLDKLELRTEPGFHWVIADGEDTTVRASTHCTYDRVVLHGERCRSLLHTAAAFDFPTSFQLTEEEALNISDHYPVEVELKLSQAHSVQPLSLTVLLLLSLLSPQLCPAA

SEQ ID NO: 1100 - protein, 60 aa, Homo sapiens
LLLCVFYIACFCKNMLGDERLVLERKCSSVQRMHFLPLILEKTFTVIYMVFCKRTINRTF

SEQ ID NO: 1101 - protein, 254 aa, Homo sapiens
  SITE (162): Xaa equals any of the naturally occurring L-amino acids
  SITE (170): Xaa equals any of the naturally occurring L-amino acids
FGTSYIGGLLSAFYLTGEEVFRIKAIRLGEKLLPAFNTPTGIPKGVVSFKSGNWGWATAGSSSILAEFGSLHLEFLHLTELSGNQVFAEKVRNIRKVLRKIEKPFGLYPNFLSPVSGNWVQHHVSVGGLGDSFYEYLIKSWLMSGKTDMEAKNMYYEALEAXRDLLAECXSRGADLHCRVARGDSGPQDGAPGLFLRGHDRPWPEDAKEEKRAHYRELAAQITKTCHESYARSDTKLGPEASGLTPAERPWPPS

SEQ ID NO: 1102 - protein, 233 aa, Homo sapiens
GPGWYPAPLRLFHSDPWGHAQPGAKRHRIPEPEAAVLFRQMATALAHCHQHGLVLRDLKLCRFVFADRERKKLVLENLEDSCVLTGPDDSLWDKHACPAYVGPEILSSRASYSGKAADVWSLGVALFTMLAGHYPFQDSEPVLLFGKIRRGAYALPAGLSAPARCLVRCLLRREPAERLTATGILLHPWLRQDPMPLAPTRSHLWEAAQVVPDGLGLDEAREEEGDREVVLYG

SEQ ID NO: 1103 - protein, 330 aa, Homo sapiens
CQLRSAAGVPSSVSVSPRDPIAMELSDANLQTLTEYLKKTLDPDPAIRRPAEKFLESVEGNQNYPLLLLTLLEKSQDNVIKVCASVTFKNYIKRNWRIVEDEPNKICEADRVAIKANIVHLMLSSPEQIQKQLSDAISIIGREDFPQKWPDLLTEMVNRFQSGDFHVINGVLRTAHSLFKRYRHEFKSNELWTEIKLVLDAFALPLTNLFKATIELCSTHANDASALRILFSSLILISKLFYSLNFQDLPEFFEDNMETWMNNFHTLLTLDNKLLQTDDEEEAGLLELLKSQICDNAALYAQKYDEEFQRYLPRFVTAIWEFTSYNGSRG

SEQ ID NO: 1104 - protein, 180 aa, Homo sapiens
  SITE (9): Xaa equals any of the naturally occurring L-amino acids
  SITE (150): Xaa equals any of the naturally occurring L-amino acids
  SITE (167): Xaa equals any of the naturally occurring L-amino acids
  SITE (171): Xaa equals any of the naturally occurring L-amino acids
  SITE (175): Xaa equals any of the naturally occurring L-amino acids
  SITE (177): Xaa equals any of the naturally occurring L-amino acids
  SITE (180): Xaa equals any of the naturally occurring L-amino acids
GTSPGRGGXGVGLRGLSSLQAPQPSRVPWPMAAYSYRPGPGAGPGPAAGAALPDQSFLWNVFQRVDKDRSGVISDTELQQALSNGTWTPFNPVTVRSIISMFDRENKAGVNFSEFTGVWKYITDWQNVFRTYDRDNSGMIDKNELKQALXVSATGSLTSSTTSSFEXLTGXGRGXSXSTX

SEQ ID NO: 1105 - protein, 241 aa, Homo sapiens
TTRFPSGQPLKPRPTLTAAGPRPGLLCFTIYIMNPSMKQKQEEIKENIKNSSVPRRTLKMIQPSASGSLVGRENELSAGLSKRKHRNDHLTSTTSSPGVIVPESSENKNLGGVTQESFDLMIKENPSSQYWKEVAEKRRKALYEALKENEKLHKEIEQKDNEIARLKKENKELAEVAEHVQYMAELIERLNGEPLDNFESLDNQEFDSEEETVEDSLVEDSEIGTCAEGTVSSSTDAKPCI

SEQ ID NO: 1106 - protein, 88 aa, Homo sapiens
FHTEFITIWDVRQCSNKHCQHVNFLKSVGHIAKNLLKHNCIFCFRALLMFCRSNVCIFLLNKLVLILELSDDFVLERTTQRRQCKSKS

SEQ ID NO: 1107 - protein, 124 aa, Homo sapiens
LVVLKRRPEKSQGHEHRAMPFLDIQKRFGLNIDRWLTIQSGEQPYKMAGRCHAFEKEWIECAHGIGYTRAEKECKIEYDDFVECLLRQKTMRRAGTIRKQRDKLIKEGKYTPPPHHIGKGEPRP

SEQ ID NO: 1108 - protein, 299 aa, Homo sapiens
  SITE (32): Xaa equals any of the naturally occurring L-amino acids
  SITE (186): Xaa equals any of the naturally occurring L-amino acids
HLLCCRAQRRPQTPPAARGLEPAQRCFEDAGXPPLLLAAVLLGLVLLVVLLLLLRHWGWGLCLIGWNEFILQPIHNLLMGDTKEQRILNHVLQHAEPGNAQSVLEAIDTYCEQKEWAMNVGDKKGKIVDAVIQEHQPSVLLELGAYCGYSAVRMARLLSPGARLITIEINPDCAAITQRMVDFAGXKDKVTLVVGASQDIIPQLKKKYDVDTLDMVFLDHWKDRYLPDTLLLEECGLLRKGTVLLADNVICPGAPDFLAHVRGSSCFECTHYQSFLEYREVVDGLEKAIYKGPGSEAGP

SEQ ID NO: 1109 - protein, 300 aa, Homo sapiens
  SITE (43): Xaa equals any of the naturally occurring L-amino acids
WIPRAAGIRHERLRDLLTRRLTGSNYPGLSISLRLTGSSAQEXASGVALGEAPDHSYESLRVTSAQKHVLHVQLNRPNKRNAMNKVFWREMVECFNKISRDADCRAVVISGAGKMFTAGIDLMDMASDILQPKGDDVARISWYLRDIITRYQETFNVIERCPKPVIAAVHGGCIGGGVDLVTACDIRYCAQDAFFQVKEVDVGLAADVGTLQRLPKVIGNQSLVNELAFTARKMMADEALGSGLVSRVFPDKEVMLDAALALAAEISSKSPVACRAPRSTCCIPATIRWPRASTTWRPGT

SEQ ID NO: 1110 - protein, 230 aa, Homo sapiens
RSCALVCKHWYRCLHGDENSEVWRSLCARSLAEEALRTDILCNLPSYKAKIRAFQHAFSTNDCSRNVYIKKNGFTLHRNPIAQSTDGARTKIGFSEGRHAWEVWWEGPLGTVAVIGIATKRAPMQCQGYVALLGSDDQSWGWNLVDNNLLHNGEVNGSFPQCNNAPKYQIGERIRVILDMEDKTLAFERGYEFLGVAFRGLPKVCLYPAVSAVYGNTEVTLVYLGKPLDG

SEQ ID NO: 1111 - protein, 59 aa, Homo sapiens
  SITE (2): Xaa equals any of the naturally occurring L-amino acids
  SITE (11): Xaa equals any of the naturally occurring L-amino acids
  SITE (16): Xaa equals any of the naturally occurring L-amino acids
PXLTKGNKSWXSTAVXTALELVDPPGCRNSAPQKNLKNTVFCIDICTVCVCVCEIKIRF

SEQ ID NO: 1112 - protein, 425 aa, Homo sapiens
  SITE (3): Xaa equals any of the naturally occurring L-amino acids
  SITE (88): Xaa equals any of the naturally occurring L-amino acids
  SITE (228): Xaa equals any of the naturally occurring L-amino acids
CIXGFYFAVLAPQELLIYEMAENGKNCDQRRVAMNKEHHNGNFTDPSSVNEKKRREREERQNIVLWRQPLITLQYFSLEILVILKEWXSKLWHRQSIVVSFLLLLAVLIATYYVEGVHQQYVQRIEKQFLLYAYWIGLGILSSVGLGTGLHTFLLYLGPHIASVTLAAYECNSVNFPEPPYPDQIICPDEEGTEGTISLWSIISKVRIEACMWGIGTAIGELPPYFMXRAARLSGAEPDDEEYQEFEEMLEHAESAQDFASRAKLAVQKLVQKVGFFGILACASIPNPLFDLAGITCGHFLVPFWTFFGATLIGKAIIKMHIQKIFVIITFSKHIVEQMVAFIGAVPGIGPSLQKPFQEYLEAQRQKLHHKSEMGTPQGENWLSWMFEKLVVVMVCYFILSIINSMAQSYAKRIQQRLNSEEKTK

SEQ ID NO: 1113 - protein, 254 aa, Homo sapiens
  SITE (1): Xaa equals any of the naturally occurring L-amino acids
XIEINPHVKGTKAGAPPRCGRSRTSGSPGLQEFGTSSSTPARPSSHHSACFLGPEIMPLGLLWLGLALLGALHAQAQDSTSDLIPAPPLSKVPLQQNFQDNQFQGKWYVVGLAGNAILREDKDPQKMYATIYELKEDKSYNVTSVLFRKKKCDYWIRTFVPGCQPGEFTLGNIKSYPGLTSYLVRVVSTNYNQHAMVFFKKVSQNREYFKITLYGRTKELTSELKENFIRFSKSLGLPENHIVFPVPIDQCIDG

SEQ ID NO: 1114 - protein, 248 aa, Homo sapiens
ASEEANPAGIRAIRTATMTVGKSSKMLQHIDYRMRCILQDGRIFIGTFKAFDKHMNLILCDCDEFRKIKPKNSKQAEREEKRVLGLVLLRGENLVSMTVEGPPPKDTGIARVPLAGAAGGPGIGRAAGRGIPAGVPMPQAPAGLAGPVRGVGGPSQQVMTPQGRGTVAAAAAAATASIAGAPTQYPPGRGGPPPPMGRGAPPPGMMGPPPGMRPPMGPPMGIPPGRGTPMGMPPPGMRPPPPGMRGLL

SEQ ID NO: 1115 - protein, 777 aa, Homo sapiens
  SITE (5): Xaa equals any of the naturally occurring L-amino acids
  SITE (9): Xaa equals any of the naturally occurring L-amino acids
  SITE (14): Xaa equals any of the naturally occurring L-amino acids
  SITE (21): Xaa equals any of the naturally occurring L-amino acids
  SITE (32): Xaa equals any of the naturally occurring L-amino acids
LTKGXKSWXSTAVXTALELVXPPGCRNSARAXPPLGSSPLGRRFRVLSSLRRSPMFEEKASSPSGKMGGEEKPIGAGEEKQKEGGKKKNKEGSGDGGRAELNPWPEYIYTRLEMYNILKAEHDSILAEKAEKDSKPIKVTLPDGKQVDAESWKTTPYQIACGISQGLADNTVIAKVNNVVWDLDRPLEEDCTLELLKFEDEEAQAVYWHSSAHIMGEAMERVYGGCLCYGPPIENGFYYDMYLEEGGVSSNDFSSLEALCKKIIKEKQAFERLEVKKETLLAMFKYNKFKCRILNEKVNTPTTTVYRCGPLIDLCRGPHVRHTGKIKALKIHKNSSTYWEGKADMETLQRIYGISFPDPKMLKEWEKFQEEAKNRDHRKIGRDQELYFFHELSPGSCFFLPKGAYIYNALIEFIRSEYRKRGFQEVVTPNIFNSRLWMTSGHWQHYSENMFSFEVEKELFALKPMNCPGHCLMFDHRPRSWRELPLRLADFGVLHRNELSGALTGLTRVRRFQQDDAHIFCAMEQIEDEIKGCLDFLRTVYSVFGFSFKLNLSTRPEKFLGDIEVWDQAEKQLENSLNEFGEKWELNSGDGAFYGPKIDIQIKDAIGRYHQCATIQLDFQLPIRFNLTYVSHDGDDKKRPVIVHRAILGSVERMIAILTENYGGKWPFWLSPRQVMVVPVGPTCDEYAQKVRQQFHDAKFMADIDLDPGCTLNKKIRNAQLAQYNFILVVGEKEKISGTVNIRTRDNKVHGERTISETIERLQQLKEFRSKQAEEEF

SEQ ID NO: 1116 - protein, 360 aa, Homo sapiens
  SITE (5): Xaa equals any of the naturally occurring L-amino acids
  SITE (19): Xaa equals any of the naturally occurring L-amino acids
  SITE (29): Xaa equals any of the naturally occurring L-amino acids
  SITE (38): Xaa equals any of the naturally occurring L-amino acids
TTSAXRWDGTRGRTRGRTXGFGNLSITQXWMMWAMVSXMEIDQPAGTGTLSRTNPPTQKPPSPPMSGRGTLGRNTPYKTLEPVKPPTVPNDYMTSPARLGSQHSPGRTASLNQRPRTHSGSSGGSGSRENSGSSSIGIPIAVPTPSPPTIGPAAPGSAPGSQYGTMTRQISRHNSTTSSTSSGGYRRTPSVTAQFSAQPHVNGGPLYSQNSISIAPPPPPMPQLTPQIPLTGFVARVQENIADSPTPPPPPPPDDIPMFDDSPPPPPPPPVDYEDEEAAVVQYNDPYADGDPAWAPKNYIEKVVAIYDYTKDKDDELSFMEGAIIYVIKKNDDGWYEGVCNRVTGLFPGNYVESIMHYTD

SEQ ID NO: 1117 - protein, 89 aa, Homo sapiens
  SITE (86): Xaa equals any of the naturally occurring L-amino acids
PARLGITCHSPAILSTALWGGSSPIPDAPTTQWKVTKPAPCPRPRRVEPVCSGLQAQILHCYRDRPHEVLLCSDLVKAYQRCVSAXHKG

SEQ ID NO: 1118 - protein, 347 aa, Homo sapiens
RGVVDSEDLPLNISREMLQQSKILKVIRKNIVKKCLELFSELAEDKENYKKFYEAFSKNLKLGIHEDSTNRRRLSELLRYHTSQSGDEMTSLSEYVSRMKETQKSIYYITGESKEQVANSAFVERVRKRGFEVVYMTEPIDEYCVQQLKEFDGKSLVSVTKEGLELPEDEEEKKKMEESKAKFENLCKLMKEILDKKVEKVTISNRLVSSPCCIVTSTYGWTANMERIMKAQALRDNSTMGYMMAKKHLEINPDHPIVETLRQKAEADKNDKAVKDLVVLLFETALLSSGFSLEDPQTHSNRIYRMIKLGLGIDEDEVAAEEPNAAVPDEIPPLEGDEDASRMEEVD

SEQ ID NO: 1119 - protein, 293 aa, Homo sapiens
  SITE (170): Xaa equals any of the naturally occurring L-amino acids
PGSPDVNRAVVRPPPPPPPPPPAPQPTMSRRKQGKPQHLSKREFSPEPLEAILTDDEPDHGPLGAPEGDHDLLTCGQCQMNFPLGDILIFIEHKRKQCNGSLCLEKAVDKPPSPSPIEMKKASNPVEVGIQVTPEDDDCLSTSSRGICPKQEHIADKLLHWRGLSSPRSXTWSSNPHAWDECRICPAGICKDEPSSYTCTTCKQPFTSAWFLLQHAQNTHGLRIYLESEHGSPLTPRVGIPSGLGAECPSQPPLHGIHIADNNPFNLLRIPGSVSREASGLGRRALSTHSPPV

SEQ ID NO: 1120 - protein, 190 aa, Homo sapiens
AAAAAGDPGAMGRARDAILDALENLTAEELKKFKLKLLSVPLREGYGRIPRGALLSMDALDLTDKLVSFYLETYGAELTANVLRDMGLQEMAGQLQAATHQGSGAAPAGIQAPPQSAAKPGLHFIDQHRAALIARVTNVEWLLDALYGKVLTDEQYQAVRPSPPTQARCGSSSVSHQPGTGPARTCSSRP

SEQ ID NO: 1121 - protein, 217 aa, Homo sapiens [sequence omitted]

SEQ ID NO: 1122 - protein, 112 aa, Homo sapiens
GNCQKCAFGYSGLDCKDKFQLILTIVGTIAGIVILSMIIALIVTARSNNKTKHIEEENLIDEDFQNLKLRSTGFTNLGAEGSVFPKVRITASRDSQMQNPYSSHSSMPRPDY

SEQ ID NO: 1123 - protein, 216 aa, Homo sapiens
GKLVCGMVSYLNDLPSQRIQPQQVAVWPTMVDINSPESLTEAYKLRAARLVEIAAKNLQKEVIHRKSKEVAWNLTSVDLVRASEAHCHYVVVKLFSEKLLKIQDKAIQAVLRSLCLLYSLYGISQNAGDFLQGSIMTEPQITQVNQRVKELLTLIRSDAVALVDAFDFQDVTLGSVLGRYDGNVYENLFEWAKNSPLNKAEVHESYKHLKSLQSKL

SEQ ID NO: 1124 - protein, 218 aa, Homo sapiens
PSPRPPDPESSQLRPGGDGAELRVLVDMDGVLADFEAGLLRGFRRRFPEEPHVPLEQRRGFLAREQYRALRPDLADKVASVYEAPGFFLDLEPIPGALDAVREMNDLPDTQVFICTSPLLKYHHCVGEKYRWVEQHLGPQFVERIILTRDKTVVLGDLLIDDKDTVRGQEETPSWEHILFTCCHNRHLVLPPTRRRLLSWSDNWREILDSKRGAAQRE

SEQ ID NO: 1125 - protein, 87 aa, Homo sapiens
MRRRVFFLHRCSILVFLFPCKCNQMPFYMWTYLYWPNIFFLLSLFFFPFFLLPLFLYSFLFLFFFFFSFFFGSCCYPRHFTSPSLKG

SEQ ID NO: 1126 - protein, 174 aa, Homo sapiens
  SITE (7): Xaa equals any of the naturally occurring L-amino acids
  SITE (173): Xaa equals any of the naturally occurring L-amino acids
PPLGKKXELHRGGGRSRLEEFQMRARPRPRPLWATVLALGALAGVGVGGPNICTTRGVSSCQQCLAVSPMCAWCSDEALPLGSPRCDLKENLLKDNCAPESIEFPVSEARVLEDRPLSDKGSGDSSQVTQVSPQRIALRLRPDDSKNFSIQVRQVEDYPVDIYYLMDLSYSMXG

SEQ ID NO: 1127 - protein, 359 aa, Homo sapiens
PQPFQGSGCVIAILGKRCSRPWRTWRGRTPSTRHICSWCTMVSGTSAAVEEYSCEFGSAKYYALCGFGGVLSCGLTHTAVVPLDLVKCRMQVDPQKYKGIFNGFSVTLKEDGVRGLAKGWAPTFLGYSMQGLCKFGFYEVFKVLYSNMLGEENTYLWRTSLYLAASASAEFFADIALAPMEAAKVRIQTQPGYANTLRDAAPKMYKEEGLKAFYKGVAPLWMRQIPYTMMKFACFERTVEALYKFVVPKPRSECSKPEQLVVTFVAGYIAGVFCAIVSHPADSVVSVLNKEKGSSASLVLKRLGFKGVWKGLFARIIMIGTLTALQWFIYDSVKVYFRLPRPPPPEMPESLKKKLGLTQ

SEQ ID NO: 1128 - protein, 399 aa, Homo sapiens
  SITE (208): Xaa equals any of the naturally occurring L-amino acids
  SITE (349): Xaa equals any of the naturally occurring L-amino acids
LEPPAEPLQYLACYRFHCSHQLGDNMWFLTTLLLWVPVDGQVDTTKAVITLQPPWVSVFQEETVTLHCEVLHLPGSSSTQWFLNGTATQTSTPSYRITSASVNDSGEYRCQRGLSGRSDPIQLEIHRGWLLLQVSSRVFTEGEPLALRCHAWKDKLVYNVLYYRNGKAFKFFHWNSNLTILKTNISHNGTYHCSGMGKHRYTSAGISXTVKELFPAPVLNASVTSPLLEGNLVTLSCETKLLLQRPGLQLYFSFYMGSKTLRGRNTSSEYQILTARREDSGLYWCEAATEDGNVLKRSPELELQVLGLQLPTPVWFHVLFYLAVGIMFLVNTVLWVTIRKELKRKKKWXLEISLDSGHEKKVISSLQEDRHLEEELKCQEQKEEQLQEGVHRKEPQGAT

SEQ ID NO: 1129 - protein, 147 aa, Homo sapiens
  SITE (7): Xaa equals any of the naturally occurring L-amino acids
  SITE (8): Xaa equals any of the naturally occurring L-amino acids
EILFIFXXFFKGLSNSAAAMAPVKKLVVKGGKKKKQVLKFTLDCTHPVEDGIMDAANFEQFLQERIKVNGKAGNLGGGVVTIERSKSKITVTSEVPFSKRYLKYLTKKYLKKNNLRDWLRVVANSKESYELRYFQINQDEEEEEDED

SEQ ID NO: 1130 - protein, 91 aa, Homo sapiens
NCSPAFYGSSLPCPQTQQKRRGRIRGLSRPAPLPTCHTRCEFEHSPEMETSHPQLNNGPFMPTLPTRRGQRCTRRPSSSPSSAPSHYSWFY

SEQ ID NO: 1131 - protein, 510 aa, Homo sapiens
  SITE (228): Xaa equals any of the naturally occurring L-amino acids
  SITE (352): Xaa equals any of the naturally occurring L-amino acids
TSEESRPRLSQLSVTDVTTSSLRLNWEAPPGAFDSFLLRFGVPSPSTLEPHPRPLLQRELMVPGTRHSAVLRDLRSGTLYSLTLYGLRGPHKADSIQGTARTLSPVLESPRDLQFSEIRETSAKVNWMPPPSRADSFKVSYQLADGGEPQSVQVDGQARTQKLQGLIPGARYEVTVVSVRGFEESEPLTGFLTTVPDGPTQLRALNLTEGFAVLHWKPPQNPVDTYDXQVTAPGAPPLQAETPGSAVDYPLHDLVLHTNYTATVRGLRGPNLTSPASITFTTGLEAPRDLEAKEVTPRTALLTWTEPPVRPAGYLLSFHTPGGQTQEILLPGGITSHQLLGLFPSTSYNARXQAMWGQSLLPPVSTSFTTGGLRIPFPRDCGEEMQNGAGASRTSTIFLNGNRERPLNVFCDMETDGGGWLVFQRRMDGQTDFWRDWEDYAHGFGNISGEFWLGNEALHSLTQAGDYSMRVDLRAGDEAVFAQYDSFHVDSAAEYYRLHLEGYHGTAGTP

SEQ ID NO: 1132 - protein, 430 aa, Homo sapiens
  SITE (182): Xaa equals any of the naturally occurring L-amino acids
  SITE (216): Xaa equals any of the naturally occurring L-amino acids
  SITE (408): Xaa equals any of the naturally occurring L-amino acids
  SITE (410): Xaa equals any of the naturally occurring L-amino acids
  SITE (414): Xaa equals any of the naturally occurring L-amino acids
  SITE (420): Xaa equals any of the naturally occurring L-amino acids
  SITE (428): Xaa equals any of the naturally occurring L-amino acids
RTADQTVTAALTKRSWNSSSSPQRRTEQTAETMESPSAPPHRWCIPWQRLLLTASLLTFWNPPTTAKLTIESTPFNVAEGKEVLLLVHNLPQHLFGYSWYKGERVDGNRQIIGYVIGTQQATPGPAYSGREIIYPNASLLIQNIIQNDTGFYTLHVIKSDLVNEEATGQFRVYPELPKPSIXSNNSKPVEDKDAVAFTCEPETQDATYLWWVNNQXLPVSPRLQLSNGNRTLTLFNVTRNDTASYKCETQNPVSARRSDSVILNVLYGPDAPTISPLNTSYRSGENLNLSCHAASNPPAQYSWFVNGTFQQSTQELFIPNITVNNSGSYTCQAHNSDTGLNRTTVTTITVYAEPPKPFITSNNSNPVEDEDAVALTCEPEIQNTTYLWWVNNQSLPVSPRLHLPMTTXPXLYSXAQGMMXDPMNVESXTN

SEQ ID NO: 1133 - protein, 737 aa, Homo sapiens
  SITE (1): Xaa equals any of the naturally occurring L-amino acids
  SITE (7): Xaa equals any of the naturally occurring L-amino acids
  SITE (140): Xaa equals any of the naturally occurring L-amino acids
  SITE (186): Xaa equals any of the naturally occurring L-amino acids
  SITE (194): Xaa equals any of the naturally occurring L-amino acids
  SITE (308): Xaa equals any of the naturally occurring L-amino acids
  SITE (534): Xaa equals any of the naturally occurring L-amino acids
  SITE (535): Xaa equals any of the naturally occurring L-amino acids
XHASAAXPTVTAALTRAFLELKLSTKRWTEKTAETMGPPSAPPCRLHVPWKEVLLTASLLTFWNPPTTAKLTIESTPFNVAEGKEVLLLAHNLPQNRIGYSWYKGERVDGNSLIVGYVIGTQQATPGPAYSGRETIYPNXSLLIQNVTQNDTGFYTLQVIKSDLVNEEATGQFHVYPELPKPSISXNNSNPVEXKDAVAFTCEPEVQNTTYLWWVNGQSLPVSPRLQLSNGNMTLTLLSVKRNDAGSYECEIQNPASANRSDPVTLNVLYGPDGPTISPSKANYRPGENLNLSCHAASNPPAQYSWFXNGTFQQSTQELFIPNITVNNSGSYTCQAHNSDTGLNRTTVTTITVYAEPPKPFITSNNSNPVEDEDAVALTCEPEIQNTTYLWWVNNQSLPVSPRLQLSNDNRTLTLLSVTRNDVGPYECGIQNELSVDHSDPVILNVLYGPDDPTISPSYTYYRPGVNLSLSCHAASNPPAQYSWLIDGNIQQHTQELFISNITEKNSGLYTCQANNSASGHSRTTVKTITVSAXXPKPSISSNNSKPVEDKDAVAFTCEPEAQNTTYLWWVNGQSLPVSPRLQLSNGNRTLTLFNVTRNDARAYVCGIQNSVSANRSDPVTLDVLYGPDTPIISPPDSSYLSGANLNLSCHSASNPSPQYSWRINGIPQQHTQVLFIAKITPNNNGTYACFVSNLATGRNNSIVKSITVSASGTSPGLSAGATVGIMIGVLVGVALI

SEQ ID NO: 1134 - protein, 71 aa, Homo sapiens
  SITE (4): Xaa equals any of the naturally occurring L-amino acids
FGTXRSVVLLLVAVRLHTLLSCPLEQPAGTEWILEEGVTTGPPRKPRADIYNLRSPDEFIVGQNQALIEPG

SEQ ID NO: 1135 - protein, 244 aa, Homo sapiens
  SITE (101): Xaa equals any of the naturally occurring L-amino acids
GLRRLDSASGTVYTAMDVATGQEVAIKQMNLQQQPKKELIINEILVMRENKNPNIVNYLDSYLVGDELWVVMEYLAGGSLTDVVTETCMDEGQIAAVCREXLQALEFLHSNQITPEQSKRSTMVGTPYWMAPEVVTRKAYGPKVDIWSLGIMAIEMIEGEPPYLNENPLRALYLIATNGTPELQNPEKLSAIFRDFLNRCLEMDVEKRGSAKELLQHQFLKIAKPLSSLTPLIAAAKEATKNNH

SEQ ID NO: 1136 - protein, 166 aa, Homo sapiens
RAEFGTSPRARRHECCRFLDDNQIITSSGDTTCALWDIETGQQTVGFAGHSGDVMSLSLAPDGRTFVSGACDASIKLWDVRDSMCRQTFIGHESDINAVAFFPNGYAFTTGSDDATCRLFDLRADQELLMYSHDNIICGITSVAFSRSDGCCSLATTTSTATSGMP

SEQ ID NO: 1137 - protein, 79 aa, Homo sapiens
TNNKSLVQLKHISNDFSKFKVDHDRIIKDRKDLSNLVMTIISIFAELKIFNFINMLLQLPDLKKKSFPHSQLKVRTLHF

SEQ ID NO: 1138 - protein, 397 aa, Homo sapiens
PTRPSSVSRRDKSKQVWEAVLLPLSLLSMMDLRNTPAKSLDKFIEDYLLPDTCFRMQINHAIDIICGFLKERCFRGSSYPVCVSKVVKGGSSGKGTTLRGRSDADLVVFLSPLTTFQDQLNRRGEFIQEIRRQLEACQRERAFSVKFEVQAPRWGNPRALSFVLSSLQLGEGVEFDVLPAFDALDFARTGQLTGGYKPNPQIYVKLIEECTDLQKEGEFSTCFTELQRDFLKQRPTKLKSLIRLVKHWYQNCKKKLGKLPPQYALELLTVYAWERGSMKTHFNTAQGFRTVLELVINYQQLCIYWTKYYDFKNPIIEKYLRRQLTKPRPVILDPADPTGNLGGGDPKGWRQLAQEAEAWLNYPCFKNWDGSPVSSWILLVRPPASSLPFIPAPLHEA

SEQ ID NO: 1139 - protein, 180 aa, Homo sapiens
FLLSNARWSNRPDTATALAGGAVMPELILSPATAPHPLKMFACSKFVSTPSLVKSTSQLLSRPLSAVVLKRPEILTDESLSSLAVSCPLTSLVSSRSFQTSAISRDIDTAAKFIGAGAATVGVAGSGAGIGTVFGSLIIGYARNPSLKQQLFSYAILGFALSEAMGLFCLMVAFLILFAM

SEQ ID NO: 1140 - protein, 484 aa, Homo sapiens
  SITE (25): Xaa equals any of the naturally occurring L-amino acids
WLLRSPGKLTARERISLLLDPGSFXESDMFVEHRCADFGMAADKNKFPGDSVVTGRGRINGRLVYVFSQDFTVFGGSLSGAHAQKICKIMDQAITVGAPVIGLNDSGGARIQEGVESLAGYADIFLRNVTASGVIPQISLIMGPCAGGAVYSPALTDFTFMVKDTSYLFITGPDVVKSVTNEDVTQEELGGAKTHTTMSGVAHRAFENDVDALCNLRDFFNYLPLSSQDPAPVRECHDPSDRLVPELDTIVPLESTKAYNMVDIIHSVVDEREFFEIMPNYAKNIIVGFARMNGRTVGIVGNQPKVASGCLDINSSVKGARFVRFCDAFNIPLITFVDVPGFLPGTAQEYGGIIRHGAKLLYAFAEATVPKVTVITRKAYGGAYDVMSSKHLCGDTNYAWPTAEIAVMGAKGAVEIIFKGHENVEAAQAEYIEKFANPFPAAVRGFVDDIIQPSSTRARICCDLDVLASKKVQRPWRKHANIPL

SEQ ID NO: 1141 - protein, 59 aa, Homo sapiens
  SITE (2): Xaa equals any of the naturally occurring L-amino acids
  SITE (53): Xaa equals any of the naturally occurring L-amino acids
  SITE (54): Xaa equals any of the naturally occurring L-amino acids
LXELERYVTSCLRKKRKPQAEKVDVIAGSSKMKGFSSSESESSSESSSSDSEXXETGPA

SEQ ID NO: 1142 - protein, 199 aa, Homo sapiens
SGYKTISAMQTIKCVVVGDGAVGKTCLLISYTTNKFPSEYVPTVFDNYAVTVMIGGEPYTLGLFDTAGQEDYDRLRPLSYPQTDVFLVCFSVVSPSSFENVKEKWVPEITHHCPKTPFLLVGTQIDLRDDPSTIEKLAKNKQKPITPETAEKLARDLKAVKYVECSALTQKGLKNVFDEAILAALEPPEPKKSRRCVLL

SEQ ID NO: 1143 - protein, 171 aa, Homo sapiens
GDLDCPDWVLAEISTLAKMYEKILKLTADAKFESGDVKATVAVLSFILSSAAKHSVDGESLSSELQQLGLPKEHAASLCRCYEEKQSPLQKHLRVCSLRMNRLAGVGWRVDYTLSSSLLQSVEEPMVHLRLEVAAAPGTPAQPVAMSLSADKFQVLLAELKQAQTLMSSLG

SEQ ID NO: 1144 - protein, 151 aa, Homo sapiens
  SITE (22): Xaa equals any of the naturally occurring L-amino acids
  SITE (38): Xaa equals any of the naturally occurring L-amino acids
  SITE (40): Xaa equals any of the naturally occurring L-amino acids
QWRQGVQGRSASGTSTCRVARXGQDWPAASPGVNLRNXFXPPLLLAPVPTPVAPSLGSPLLLSHPERQSGPVTGGAGEGHRCASPQTVCQVSELVTRPAAQPSAAAQPAAPAGGRTPGRAGPHLPIYKIGQGNMKADLQAAATAKPGKSQQ

SEQ ID NO: 1145 - protein, 70 aa, Homo sapiens
ADIAGVLAIRPDELRFRYSMVAYWRQAGLSYIRYSQICAKAVRDALKTEFKANAEKTSGSNVKIVKVKKE

SEQ ID NO: 1146 - protein, 166 aa, Homo sapiens
  SITE (56): Xaa equals any of the naturally occurring L-amino acids
LHANQVIHRDIKSDNVLLGMEGSVKLTDFGFCAQITPEQSKRSTMVGTPYWMAPEXVTRKAYGPKVDIWSLGIMAIEMVEGEPPYLNENPLRALYLIATNGTPELQNPEKLSPIFRDFLNRCLEMDVEKRGSAKELLQHPFLKLAKPLSSLTPLIMAAKEAMKSNR

SEQ ID NO: 1147 - protein, 420 aa, Homo sapiens
  SITE (203): Xaa equals any of the naturally occurring L-amino acids
CPPFSVRVPPWAGLALLPSPSLMALLRRPTVSSDLENIDTGVNSKVKSHVTIRRTVLEEIGNRVTTRAAQVAKKAQNTKVPVQPTKTTNVNKQLKPTASVKPVQMEKLAPKGPSPTPEDVSMKEENLCQAFSDALLCKIEDIDNEDWENPQLCSDYVKDIYQYLRQLEVLQSINPHFLDGRDINGRMRAILVDWLVQVHSKFXLLQETLYMCVGIMDRFLQVQPVSRKKLQLVGITALLLASKYEEMFSPNIEDFVYITDNAYTSSQIREMETLILKELKFELGRPLPLHFLRRASKAGEVDVEQHTLAKYLMELTLIDYDMVHYHPSKVAAAASCLSQKVLGQGKWNLKQQYYTGYTENEVLEVMQHMAKNVVKVNENLTKFIAIKNKYASSKLLKISMIPQLNSKAVKDLASPLIGRS

SEQ ID NO: 1148 - protein, 249 aa, Homo sapiens
  SITE (244): Xaa equals any of the naturally occurring L-amino acids
QSNAVWLLGHLHLSTLSSSQSRASVPTDYSYLPESSFIGAAIGFFITGGKKGPESVPPSLLKVVMKPIATVGESYQYPPVNWAALLSPLMRLNFGEEIQQLCLEIMVTQAQSSQNAAALLGLWVTPPLIHSLSLNTKRYLLISAPLWIKHISDEQILGFVENLMVAVFKAASPLGSPELCPSALHGLSQAMKLPSPAHHLWSLLSEATGKIFDLLPNKIRRKDLELYISIAKCLLEMTDDDANXDRPGY

SEQ ID NO: 1149 - protein, 239 aa, Homo sapiens
RDPPRPVQSGLGAAGTLSWLPPPEQPVLVPRLPAPRPVMTLRPSLLPLHLLLLLLLSAAVCRAEAGLETESPVRTLQVETLVEPPEPCAEPAAFGDTLHIHYTGSLVDGRIIDTSLTRDPLVIELGQKQVIPGLEQSLLDMCVGEKRRAIIPSHLAYGKRGFPPSVPADAVVQYDVELIALIRANYWLKLVKGILPLVGMAMVPALLGLIGYHLYRKANRPKVSKKKLKEEKRNKSKKK

SEQ ID NO: 1150 - protein, 394 aa, Homo sapiens
  SITE (3): Xaa equals any of the naturally occurring L-amino acids
AEXGKTEWLFGMDEGRKQLAASAGFRRLITVALHRGQQYESMDHIQAELSARVMELAPAGMPTQQQVPFLSVGGDIGVRTVQHQDCSPLSGDYVIEDVQGDDKRYFRRLIFLSNRNVVQSEARLLKDVSHKAQKKRKKDRKKQRPADAEDLPAAPGQSIDKSYLCCEHHKAMIAGLALLRNPELLLEIPLALLVVGLGGGSLPLFVHDHFPKSCIDAVEIDPSMLEVATQWFGFSQSDRMKVHIADGLDYIASLAGGGEARPCYDVIMFDVDSKDPTLGMSCPPPAFVEQSFLQKVKSILTPEGVFILNLVCRDLGLKDSVLAGLKAVFPLLYVRRIEGEVNEILFCQLHPEQKLATPELLETAQALERTLRKPGRGWDDTYVLSDMLKTVKIV

SEQ ID NO: 1151 - protein, 111 aa, Homo sapiens
VNVNNPSLCHSSHLVDLGSGSVEFCAWEWSWREWGLCTAATSPRSSHLPAPRPGCMAAPVCVQRSVSHPLHLLSGGLGSPTCCQDLGAIKYSGFVKKKKKKKKKKKKKKKK

SEQ ID NO: 1152 - protein, 172 aa, Homo sapiens
LGDTIEGRLQVPVRNSRVDPRVRARGADRMGKCRGLRTARKLRSHRRDQKWHDKQYKKAHLGTALKANPFGGASHAKGIVLEKVGVEAKQPNSAIRKCVRVQLIKNGKKITAFVPNDGCLNFIEENDEVLVAGFGRKGHAVGDIPGVRFKVVKVANVSLLALYKGKKERPRS

SEQ ID NO: 1153 - protein, 197 aa, Homo sapiens
YWCEQCDVQFSSSSELYLHFQEHSCDEQYLCQFCEHETNDPEDLHSHVVNEHACKLIELSDKYNNGEHGQYSLLSKITFDKCKNFFVCQVCGFRSRLHTNVNRHVAIEHTKIFPHVCDDCGKGFSSMLEYCKHLNSHLSEGIYLCQYCEYSTGQIEDLKIHLDFKHSADLPHKCSDCLMRFGNERELISHLPVHETT

SEQ ID NO: 1154 - protein, 156 aa, Homo sapiens
PAKERRSSSSSSSSSSSSSSSSSSSSSSSSSGSSSSDSEGSSLPVQPEVALKRVPSPTPAPKEAVREGRPPEPTPAKRKRRSSSSSSSSSSSSSSSSSSSSSSSSSSSSSSSSSSSSSSSSSSPSPAKPGPQACPNLQAPRSHPLASGGPAAPGSQ

SEQ ID NO: 1155 - protein, 125 aa, Homo sapiens
  SITE (73): Xaa equals any of the naturally occurring L-amino acids
  SITE (105): Xaa equals any of the naturally occurring L-amino acids
  SITE (122): Xaa equals any of the naturally occurring L-amino acids
PEAPRGVVTCLRALLSHQHQTRPHRVPGTMFGKRKKRVEISAPSNFEHRVHTGFDQHEQKFTGLPRQWQSLIXESARRPKPLVDPACITSIQPGAPKTIVRGSKXAKDGALTLLLDEFENMXVTR

SEQ ID NO: 1156 - protein, 202 aa, Homo sapiens
RPTRPQPSPDEARPLQALLDGRGLCVNASAVSRLRAYLLPAPPAPGNASESEEDRSAGSVESPSVSSTHRVSDPKFHPLHSKIIIIKKGHAKDSQRYKVDYESQSTDTQNFSSESKRETEYGPCRREMEDTLNHLKFLNVLSPRGVHIPNCDKKGFYKKKQCRPSKGRKRGFCWCVDKYGQPLPGYTTKGKEDVHCYSMQSK

SEQ ID NO: 1157 - protein, 269 aa, Homo sapiens
RRCCHSATMFEARLVQGSILKKVLEALKDLINEACWDISSSGVNLQSMDSSHVSLVQLTLRSEGFDTYRCDRNLAMGVNLTSMSKILKCAGNEDIITLRAEDNADTLALVFEAPNQEKVSDYEMKLMDLDVEQLGIPEQEYSCVVKMPSGEFARICRDLSHIGDAVVISCAKDGVKFSASGELGNGNIKLSQTSNVDKEEEAVTIEMNEPVQLTFALRYLNFFTKATPLSSTVTLSMSADVPLVVEYKIADMGHLKYYLAPKIEDEEGS

SEQ ID NO: 1158 - protein, 639 aa, Homo sapiens
  SITE (129): Xaa equals any of the naturally occurring L-amino acids
  SITE (150): Xaa equals any of the naturally occurring L-amino acids
MDEMATTQISKDELDELKEAFAKVDLNSNGFICDYELHELFKEANMPLPGYKVREIIQKLMLDGDRNKDGKISFDEFVYIFQEVKSSDIAKTFRKAINRKEGICALGGTSELSSEGTQHSYSEEEKYAXVNWINKALENDPDCRHVIPMXPNTDDLFKAVGDGIVLCKMINLSVPDTIDERAINKKKLTPFIIQENLNLALNSASAIGCHVVNIGAEDLRAGKPHLVLGLLWQIIKIGLFADIELSRNEALAALLRDGETLEELMKLSPEELLLRWANFHLENSGWQKINNFSADIKLIDFSNSVKDSKAYFHLLNQIAPKGQKEGEPRIDINMSGFNETDDLKRAESMLQQADKLGCRQFVTPADVVSGNPKLNLAFVANLFNKYPALTKPENQDIDWTLLEGETREERTFRNWMNSLGVNPHVNHLYADLQDALVILQLYERIKVPVDWSKVNKPPYPKLGANMKKLENCNYAVELGKHPAKFSLVGIGGQDLNDGNQTLTLALVWQLMRRYTLNVLEDLGDGQKANDDIIVNWVNRTLSEAGKSTSIQSFKDKTISSSLAVVDLIDAIQPGCINYDLVKSGNLTEDDKHNNAKYAVSMARRIGARVYALPEDLVEVKPKMVMTVFACLMGRGMKRV

SEQ ID NO: 1159 - protein, 63 aa, Homo sapiens
TIWPLNFHRKNDPTFLSMSYLISRSWDGLTILVYILDTERCYASVIIPRLEIGRAKKVLLFFL

SEQ ID NO: 1160 - protein, 207 aa, Homo sapiens
EVYGGSLDKEFDESSPKQPTNPYASSKAAAECFVQSYWEQYKFPVVITRSSNVYGPHQYPEKVIPKFISLLQHNRKCCIHGSGLQTRNFLYATDVVEAFLTVLKKGKPGEIYNIGTNFEMSVVQLAKELIQLIKETNSESEMENWVDYVNDRPTNDMRYPMKSEKIHGLGWRPKVPWKEGIKKTIEWYRENFHNWKNVEKALEPFPV

SEQ ID NO: 1161 - protein, 848 aa, Homo sapiens
  SITE (815): Xaa equals any of the naturally occurring L-amino acids
  SITE (844): Xaa equals any of the naturally occurring L-amino acids
ALGLGVTMATEEFIIRIPPYHYIHVLDQNSNVSRVEVGPKTYIRQDNERVLFAPMRMVTVPPRHYCTVANPVSRDAQGLVLFDVTGQVRLRHADLEIRLAQDPFPLYPGEVLEKDITPLQVVLPNTALHLKALLDFEDKDGDKVVAGDEWLFEGPGTYIPRKEVEVVEIIQATIIRQNQALRLRARKECWDRDGKERVTGEEWLVTTVGAYLPAVFEEVLDLVDAVILTEKTALHLRARRNFRDFRGVSRRTGEEWLVTVQDTEAHVPDVHEEVLGVVPITTLGPHNYCVILDPVGPDGKNQLGQKRVVKGEKSFFLQPGEQLEQGIQDVYVLSEQQGLLLRALQPLEEGEDEEKVSHQAGDHWLIRGPLEYVPSAKVEVVEERQAIPLDENEGIYVQDVKTGKVRAVIGSTYMLTQDEVLWEKELPPGVEELLNKGQDPLADRGEKDTAKSLQPLAPRNKTRVVSYRVPHNAAVQVYDYREKRARVVFGPELVSLGPEEQFTVLSLSAGRPKRPHARRALCLLLGPDFFTDVITIETADHARLQLQLAYNWHFEVNDRKDPQETAKLFSVPDFVGDACKAIASRVRGAVASVTFDDFHKNSARIIRTAVFGFETSEAKGPDGMALPRPRDQAVFPQNGLVVSSVDVQSVEPVDQRTRDALQRSVQLAIEITTNSQEAAAKHEAQRLEQEARGRLERQKILDQSEAEKARKELLELEALSMAVESTGTAKAEAESRAEAARIEGEGSVLQAKLKAQALAIETEAELQRVQKVRELELVYARAQLELEVSKAQQLAEVEVKKFKQMTEAIGPSTIXDLAVAGPEMQVKLLQSLGLKSTLITDGFXSINF

SEQ ID NO: 1162 - protein, 58 aa, Homo sapiens
  SITE (2): Xaa equals any of the naturally occurring L-amino acids
  SITE (28): Xaa equals any of the naturally occurring L-amino acids
FXVGIVNFSQPPHAAGECGCSSSEMLTXKREVKQSRYVQPCLQNPSLSSLIRSFLVFY

SEQ ID NO: 1163 - protein, 565 aa, Homo sapiens
IPGSTHASAGNLDSPEGGFDAIMQVAVCGSLIGWRNVTRLLVFSTDAGFHFAGDGKLGGIVLPNDGQCHLENNMYTMSHYYDYPSIAHLVQKLSENNIQTIFAVTEEFQPVYKELKNLIPKSAVGTLSANSSNVIQLIIDAYNSLSSEVILENGKLSEGVTISYKSYCKNGVNGTGENGRKCSNISIGDEVQFEISITSNKCPKKDSDSFKIRPLGFTEEVEVILQYICECECQSEGIPESPKCHEGNGTFECGACRCNEGRVGRHCECSTDEVNSEDMDAYCRKENSSEICSNNGECVCGQCVCRKRDNTNEIYSGKFCECDNFNCDRSNGLICGGNGVCKCRVCECNPNYTGSACDCSLDTSTCEASNGQICNGRGICECGVCKCTDPKFQGQTCEMCQTCLGVCAEHKECVQCRAFNKGEKKDTCTQECSYFNITKVESRDKLPQPVQPDPVSHCKEKDVDDCWFYFTYSVNGNNEVMVHVVENPECPTGPDIIPIVAGVVAGIVLIGLALLLIWKLLMIIHDRREFAKFEKEKMNAKWDTGENPIYKSAVTTVVNPKYEGK

SEQ ID NO: 1164 - protein, 138 aa, Homo sapiens
GTAGGAGGQREVRGCSAQETMSGGSSCSQTPSRAIPATRRVVLGDGVQLPPGDYSTTPGGTLFSTTPGGTRIIYDRKFLMECRNSPVTKTPPRDLPTIPGVTSPSSDEPPMEASQSHLRNSPEDKRAGGEESQFEMDI

SEQ ID NO: 1165 - protein, 407 aa, Homo sapiens
AACQPRCCCSSCCGTADRAAAPLSPLQAPIWAPATSMDARRVPQKDLRVKKNLKKFRYVKLISMETSSSSDDSCDSFASDNFANTRLQSVREGCRTRSQCRHSGPLRVAMKFPARSTRGATNKKAESRQPSENSVTDSNSDSEDESGMNFLEKRALNIKQNKAMLAKLMSELESFPGSFRGRHPLPGSDSQSRRPRRRTFPGVASRRNPERRARPLTRSRSRILGSLDALPMEEEEEEDKYMLVRKRKTVDGYMNEDDLPRSRRSRSSVTLPHIIRPVEEITEEELENVCSNSREKIYNRSLGSTCHQCRQKTIDTKTNCRNPDCWGVRGQFCGPCLRNRYGEEVRDALLDPNWHCPPCRGICNCSFCRQRDGRCATGVLVYLAKYHGFGNVHAYLKSLKQEFEMQA

SEQ ID NO: 1166 - protein, 240 aa, Homo sapiens
  SITE (197): Xaa equals any of the naturally occurring L-amino acids
  SITE (201): Xaa equals any of the naturally occurring L-amino acids
  SITE (202): Xaa equals any of the naturally occurring L-amino acids
  SITE (219): Xaa equals any of the naturally occurring L-amino acids
PDGRPTGDAFVLFACEEYAQNALRKHKDLLGKRYIELFRSTAAEVQQVLNRFSSAPLIPLPTPPIIPVLPQQFVPPTNVRDCIRLRGLPYAATIEDILDFLGEFATDIRTHGVHMVLNHQGRPSGDAFIQMKSADRAFMAAQKCHKKNMKDRYVEVFQCSAEEMNFVLMGGTLNRNGLSPPPCLSPPSYTFPAPAAXIPTXXAIYQPSVILNPRALQPXTAYYPAGTQLFMNYTAYYPSV

SEQ ID NO: 1167 - protein, 106 aa, Homo sapiens
GGYSVDSPTLTRFFTFHFILPFIIAALAALHLLFLHETGSNNPLGITSHSDKITFHPYYTIKDALGLLLFLLSLMTLTLFSPDLLGDPDNYTLANPLNTPPHIKPE

SEQ ID NO: 1168 - protein, 210 aa, Homo sapiens
  SITE (53): Xaa equals any of the naturally occurring L-amino acids
QHVQREWSGHGEDRGDGEDAERGSCREEPAHGVEGAGDGAAAAGPGGGAAEAXQVERRLQSESARRQQLVEKEVKMREKQFSQARPLTRYLPIRKEDFDLKTHIESSGHGVDTCLHVVLSSKVCRGYLVKMGGKIKSWKKRWFVFDRLKRTLSYYVDKHETKLKGVIYFQAIEGSVLRPPAPVQPRRGFSASTMVTEKPEPSPHLLRKDP

SEQ ID NO: 1169 - protein, 181 aa, Homo sapiens
TSKMRSLETLGRPKPECEGYDPNALYCICRQPHNNRFMICCDRCEEWFHGDCVGISEARGRLLERNGEDYICPNCTILQVQDETHSETADQQEAKWRPGDADGTDCTSIGTIEQKSSEDQGIKGRIEKAANPSGKKKLKIFQPVIEAPGASKCIGPGCCHVAHPTRCTAVMTVSSNTPQRQ

SEQ ID NO: 1170 - protein, 166 aa, Homo sapiens
  SITE (3): Xaa equals any of the naturally occurring L-amino acids
  SITE (18): Xaa equals any of the naturally occurring L-amino acids
  SITE (131): Xaa equals any of the naturally occurring L-amino acids
AQXLSSPVRGISGEQSTXGSFPLRYVQDQVAAPFQLSNHTGRIKVVFTPSICKVTCTKGSCQNSCEKGNTTTLISENGHAADTLTATNFRVVICHLPCMNGGQCSSRDKCQCPPNFTGKLCQIPVHGASVXKLYQHSQQPGKALGTHVIHSTHTLPLTVTSQQESK

SEQ ID NO: 1171 - protein, 37 aa, Homo sapiens [sequence omitted]

SEQ ID NO: 1172 - protein, 169 aa, Homo sapiens
  SITE (22): Xaa equals any of the naturally occurring L-amino acids
  SITE (70): Xaa equals any of the naturally occurring L-amino acids
  SITE (115): Xaa equals any of the naturally occurring L-amino acids
  SITE (116): Xaa equals any of the naturally occurring L-amino acids
  SITE (163): Xaa equals any of the naturally occurring L-amino acids
  SITE (167): Xaa equals any of the naturally occurring L-amino acids
RGAMVSCRPGCCCPWTPAVLRXSVRGTFYSPPESFAGSDNESDEEVAGKKSFSAQEREYIRQGKEATAVXDQILAQEENWKFEKNNEYGDTVYTIEVPFHGKTFILKTFLPCPAXXVYQEVILQPERMVLWNKTVTACQILQRVEDNTLISYDVSARGCGRRXLPQXTS

SEQ ID NO: 1173 - protein, 180 aa, Homo sapiens
  SITE (171): Xaa equals any of the naturally occurring L-amino acids
EYGDTVYTIEVPFHGKTFILKTFLPCPAELVYQEVILQPERMVLWNKTVTACQILQRVEDNTLISYDVSAGAAGGVVSPRDFVNVRRIERRRDRYLSSGIATSHSAKPPTHKYVRGENGPGGFIVLKSASNPRVCTFVWILNTDLKGRLPRYLIHQSLAATMFEFAFHLRXRISELGARA

SEQ ID NO: 1174 - protein, 436 aa, Homo sapiens
  SITE (14): Xaa equals any of the naturally occurring L-amino acids
  SITE (426): Xaa equals any of the naturally occurring L-amino acids
RHQRRRSVWRSRGXCCRCCCTNRRSPQPCASSLPPRTGEKQPRNFMNKHQKPVLTGQRFKTRKRDEKEKFEPTVFRDTLVQGLNEAGDDLEAVAKFLDSTGSRLDYRRYADTLFDILVAGSMLAPGGTRIDDGDKTKMTNHCVFSANEDHETIRNYAQVFNKLIRRYKYLEKAFEDEMKKLLLFLKAFSETEQTKLAMLSGILLGNGTLPATILTSLFTDSLVKEGIAASFAVKLFKAWMAEKDANSVTSSLRKANLDKRLLELFPVNRQSVDHFAKYFTDAGLKELSDFLRVQQSLGTRKELQKELQERLSQECPIKEVVLYVKEEMKRNDLPETAVIGLLWTCIMNAVEWNKKEELVAEQALKHLKQYAPLLAVFSSQGQSELILLQKVQEYCYDNIHFMKAFQKIVLPYTISVLLLRSEHQLXSCRFGTSGTS

SEQ ID NO: 1175 - protein, 366 aa, Homo sapiens
TEPVGYTKAEEPIAMRSLGALLLLLSACLAVSAGPVPTPPDNIQVQENFNISRIYGKWYNLAIGSTCPWLKKIMDRMTVSTLVLGEGATEAEISMTSTRWRKGVCEETSGAYEKTDTDGKFLYHKSKWNITMESYVVHTNYDEYAIFLTKKFSRHHGPTITAKLYGRAPQLRETLLQDFRVVAQGVGIPEDSIFTMADRGECVPGEQEPEPILIPRVRRAVLPQEEEGSGGGQLVTEVTKKEDSCQLGYSAGPCMGMTSRYFYNGTSMACETFQYGGCMGNGNNFVTEKECLQTCRTVAACNLPIVRGPCRAFIQLWAFDAVKGKCVLFPYGGCQGNGNKFYSEKECREYCGVPGDGDEELLRFSN

SEQ ID NO: 1176 - protein, 133 aa, Homo sapiens
  SITE (105): Xaa equals any of the naturally occurring L-amino acids
  SITE (120): Xaa equals any of the naturally occurring L-amino acids
  SITE (126): Xaa equals any of the naturally occurring L-amino acids
MPRSSHHPPRRHYHHHHYHQPPPSPCPSPPLTSPSPLSWILWTCWPSTAATRPGRRKWGCRLCPRHSSPLLLLHLNLLAWAPYPHPATTRGDRKQKKRDQNKSAXLRYRQRKGAGGVEGXGKGKLXGGWEGKG

SEQ ID NO: 1177 - protein, 583 aa, Homo sapiens
TAQRPRSPENCRPSTMWLRAFILATLSASAAWAGHPSSPPVVDTVHGKVLGKFVSLEGFAQPVAIFLGIPFAKPPLGPLRFTPPQPAEPWSFVKNATSYPPMCTQDPKAGQLLSELFTNRKENIPLKLSEDCLYLNIYTPADLTKKNRLPVMVWIHGGGLMVGAASTYDGLALAAHENVVVVTIQYRLGIWGFFSTGDEHSRGNWGHLDQVAALRWVQDNIASFGGNPGSVTIFGESAGGESVSVLVLSPLAKNLFHRAISESGVALTSVLVKKGDVKPLAEQIAITAGCKTTTSAVMVHCLRQKTEEELLETTLKMKFLSLDLQGDPRESQPLLGTVIDGMLLLKTPEELQAERNFHTVPYMVGINKQEFGWLIPMQLMSYPLSEGQLDQKTAMSLLWKSYPLVCIAKELIPEATEKYLGGTDDTVKKKDLFLDLIADVMFGVPSVIVARNHRDAGAPTYMYEFQYRPSFSSDMKPKTVIGDHGDELFSVFGAPFLKEGASEEEIRLSKMVMKFWANFARNGNPNGEGLPHWPEYNQKEGYLQIGANTQAAQKLKDKEVAFWTNLFAKKAVEKPPQTEHIEL

SEQ ID NO: 1178 - protein, 98 aa, Homo sapiens
  SITE (4): Xaa equals any of the naturally occurring L-amino acids
PGRXQLRAKFSCPPADRVNVTVRPGLAMALSGSTEPCAQLSISSIGVVGTAEDNRSHSAHFFEFLTKELALGQDRILIRFFPLESWQIGKIGTVMTFL

SEQ ID NO: 1179 - protein, 127 aa, Homo sapiens
  SITE (7): Xaa equals any of the naturally occurring L-amino acids
  SITE (50): Xaa equals any of the naturally occurring L-amino acids
  SITE (67): Xaa equals any of the naturally occurring L-amino acids
FRPAVSXGSLCLPARTAHSPASSAACRTMAQGQRKFQAHKPAKSKTAAAXSEKNRGPRKGGRVIAPXKARVVQQQKLKKNLEVGIRKKIEHDVVMKASSSLPKKLALLKAPAKKKGAAAATSSKTPS

SEQ ID NO: 1180 - protein, 94 aa, Homo sapiens
SSYRSKAYTHTKITVPRERVCVSVRVSVCARARSWPNVRTLHKGGRSSYRLFNVRETIFLLFQLYQILVPQHRNDSESQTKCIICSILILLLHS

SEQ ID NO: 1181 - protein, 353 aa, Homo sapiens
GSLDLWRGAELSPGHSTLFTLCACAKGAMAASCVLLHTGQKMPLIGLGTWKSEPGQVKAAVKYALSVGYRHIDCAAIYGNEPEIGEALKEDVGPGKAVPREELFVTSKLWNTKHHPEDVEPALRKTLADLQLEYLDLYLMHWPYAFERGDNPFPKNADGTICYDSTHYKETWKALEALVAKGLVQALGLSNFNSRQIDDILSVASVRPAVLQVECHPYLAQNELIAHCQARGLEVTAYSPLGSSDRAWRDPDEPVLLEEPVVLALAEKYGRSPAQILLRWQVQRKVICIPKSITPSRILQNIKVFDFTFSPEEMKQLNALNKNWRYIVPMLTVDGKRVPRDAGHPLYPFNDPY

SEQ ID NO: 1182 - protein, 174 aa, Homo sapiens
ARDSLQLSMAQTSSYFMLISCLMFLSQSQGQEAQTELPQARISCPEGTNAYRSYCYYFNEDRETWVDADLYCQNMNSGNLVSVLTQAEGAFVASLIKESGTDDFNVWIGLHDPKKNRRWHWSSGSLVSYKSWGIGAPSSVNPGYCVSLTSSTGFQKWKDVPCEDKFSFVCKFKN

SEQ ID NO: 1183 - protein, 342 aa, Homo sapiens
  SITE (169): Xaa equals any of the naturally occurring L-amino acids
  SITE (171): Xaa equals any of the naturally occurring L-amino acids
  SITE (187): Xaa equals any of the naturally occurring L-amino acids
  SITE (302): Xaa equals any of the naturally occurring L-amino acids
  SITE (308): Xaa equals any of the naturally occurring L-amino acids
SIFSYIRLELPSMWLLVSVILISRISSVGGEATFCDFPKINHGILYDEEKYKPFSQVPTGEVFYYSCEYNFVSPSKSFWTRITCTEEGWSPTPKCLRLCFFPFVENGHSESSGQTHLEGDTVQIICNTGYRLQNNENNISCVERGWSTPPKCRSTDTSCVNPPTVQNAXIXSRQMSKYPSGERVRYXCRSPYEMFGDEEVMCLNGNWTEPPQCKDSTGKCGPPPPIDNGDITSFPLSVYAPASSVEYQCQNLYQLEGNKRITCRNGQWSEPPKCLHPCVISREIMENYNIALRWTAKQKLYXRTGESXEFVCKRGYRLSSRSHTLRTTCWDGKLEYPTCAKR

SEQ ID NO: 1184 - protein, 198 aa, Homo sapiens
  SITE (2): Xaa equals any of the naturally occurring L-amino acids
  SITE (161): Xaa equals any of the naturally occurring L-amino acids
PXRPRGAAAAAAAAGAAMPKGGRKGGHKGRARQYTSPEEIDAQLQAEKQKAREEEEQKEGGDGAAGDPKKEKKSLDSDESEDEEDDYQQKRKGVEGLIDIENPNRVAQTTKKVTQLDLDGPKELSRREREEIEKQKAKERYMKMHLAGKTEQAKADLARLXIIRKQREEAARKKEEERKAKDDATLSGKRMQSLSLNK

SEQ ID NO: 1185 - protein, 210 aa, Homo sapiens
AHASAHASGMDLSLLWVLLPLVTMAWGQYGDYGYPYQQYHDYSDDGWVNLNRQGFSYQCPQGQVIVAVRSIFSKKEGSDRQWNYACMPTPQSLGEPTECWWEEINRAGMEWYQTCSNNGLVAGFQSRYFESVLDREWQFYCCRYSKRCPYSCWLTTEYPGHYGEEMDMISYNYDYYIRGATTTFSAVERDRQWKFIMCRMTEYDCEFANV

SEQ ID NO: 1186 - protein, 141 aa, Homo sapiens [sequence omitted]

SEQ ID NO: 1187 - protein, 76 aa, Homo sapiens
  SITE (42): Xaa equals any of the naturally occurring L-amino acids
  SITE (66): Xaa equals any of the naturally occurring L-amino acids
  SITE (74): Xaa equals any of the naturally occurring L-amino acids
LLGSCLQEAMTLNSEPYSVLTSGSHVFLCQVIKYLVLVFCLXPKLPLWVHRRLGSIVRMAIREYKXGFSKGLGXDS

SEQ ID NO: 1188 - protein, 516 aa, Homo sapiens
IRIAALDDFRTSLTMSSTRSQNPHGLKQIGLDQIWDDLRAGIQQVYTRQSMAKSRYMELYTHVYNYCTSVHQSNQARGAGVPPSKSKKGQTPGGAQFVGLELYKRLKEFLKNYLTNLLKDGEDLMDESVLKFYTQQWEDYRFSSKVLNGICAYLNRHWVRRECDEGRKGIYEIYSLALVTWRDCLFRPLNKQVTNAVLKLIEKERNGETINTRLISGVVQSYVELGLNEDDAFAKGPTLTVYKESFESQFLADTERFYTRESTEFLQQNPVTEYMKKAEARLLEEQRRVQVYLHESTQDELARKCEQVLIEKHLEIFHTEFQNLLDADKNEDLGRMYNLVSRIQDGLGELKKLLETHIHNQGLAAIEKCGEAALNDPKMYVQTVLDVHKKYNALVMSAFNNDAGFVAALDKACGRFINNNAVTKMAQSSSKSPELLARYCDSLLKKSSKNPEEAELEDTLNQVMVVFKYIEDKDVFQKFYAKMLAKRLVHQNSASDDAEASMISKLKQACGFEYTS

SEQ ID NO: 1189 - protein, 287 aa, Homo sapiens
  SITE (20): Xaa equals any of the naturally occurring L-amino acids
  SITE (24): Xaa equals any of the naturally occurring L-amino acids
  SITE (27): Xaa equals any of the naturally occurring L-amino acids
  SITE (55): Xaa equals any of the naturally occurring L-amino acids
  SITE (172): Xaa equals any of the naturally occurring L-amino acids
  SITE (254): Xaa equals any of the naturally occurring L-amino acids
  SITE (271): Xaa equals any of the naturally occurring L-amino acids
  SITE (274): Xaa equals any of the naturally occurring L-amino acids
  SITE (275): Xaa equals any of the naturally occurring L-amino acids
  SITE (280): Xaa equals any of the naturally occurring L-amino acids
MSYCDESRLSNLLRRITREXDRDXRLXTVKQLKEFIQQPENKLVLVKQLDILAAXHDVLNESSKLLQELRQEGACCLGLLCASLSYEAEKIFKWIFSKFSSSAKDEVKLLYLCATYKALETVGEKKAFSSVMQLVMTSLQSILENVDTPELLCKCVKCILLVARCYPHIFSXNFRDTVDILVGWHRDHTQKPSLTQQVSGWLQSLEPFWVADLAFPTTLLGQFLEDMEAYAEDLSHVASGESVDEDVPPPSVSXPKLAALLRVFSTVVRSXGEXXSPIRXLQLLRHT

SEQ ID NO: 1190 - protein, 100 aa, Homo sapiens
RPPSRWSWWQGKPTGGVCVAAARSSPSVTAPTSSNALAYLHSSSRPKRPAWWHSVPARPLRGPRTAMAPTGVSACRRQKWAPHSEGAAAVQPQVALAPGL

SEQ ID NO: 1191 - protein, 115 aa, Homo sapiens
NDVIHQYVYMYFYIDLENTAKTFMTSCITAFVYIFLTVIIPTGTLTVALLNVQNLYFRNNKKKDTYMFPKQWCGECVRKTNLIGSTNTKCITNAPVHVFVLKRVNEDLYISINDI

SEQ ID NO: 1192 - protein, 415 aa, Homo sapiens
  SITE (11): Xaa equals any of the naturally occurring L-amino acids
  SITE (13): Xaa equals any of the naturally occurring L-amino acids
RIPPESLAREXRXTKSFSNPRRPDRGTWSLSEKFNLRDKMQWTSLLLLAGLFSLSQAQYEDDPHWWFHYLRSQQSTYYDPYDPYPYETYEPYPYGVDEGPAYTYGSPSPPDPRDCPQECDCPPNFPTAMYCDNRNLKYLPFVPSRMKYVYFQNNQITSIQEGVFDNATGLLWIALHGNQITSDKVGRKVFSKLRHLERLYLDHNNLTRMPGPLPRSLRELHLDHNQISRVPNNALEGLENLTALYLQHNEIQEVGSSMRGLRSLILLDLSYNHLRKVPDGLPSALEQLYMEHNNVYTVPDSYFRGAPKLLYVRLSHNSLTNNGLASNTFNSSSLLELDLSYNQLQKIPPVNTNLENLYLQGNRINEFSISSFCTVVDVVNFSKLQVLRLDGNEIKRSAMPADAPLCLRLASLIEI

SEQ ID NO: 1193 - protein, 620 aa, Homo sapiens
  SITE (375): Xaa equals any of the naturally occurring L-amino acids
  SITE (501): Xaa equals any of the naturally occurring L-amino acids
  SITE (532): Xaa equals any of the naturally occurring L-amino acids
  SITE (546): Xaa equals any of the naturally occurring L-amino acids
SAVTAFSEGSVIAYYWSEFSIPQHLVEEAERVMAEERVVMLPPRARSLKSFVVTSVVAFPTDSKTVQRTQDNSCSFGLHARGVELMRFTTPGFPDSPYPAHARCQWALRGDADSVLSLTFRSFDLASCDERGSDLVTVYNTLSPMEPHALVQLCGTYPPSYNLTFHSSQNVLLITLITNTERRHPGFEATFFQLPRMSSCGGRLRKAQGTFNSPYYPGHYPPNIDCTWNIEVPNNQHVKVRFKFFYLLEPGVPAGTCPKDYVEINGEKYCGERSQFVVTSNSNKITVRFHSDQSYTDTGFLAEYLSYDSSDPCPGQFTCRTGRCIRKELRCDGWADCTDHSDELNCSCDAGHQFTCKNKFCKPLFWVCDSVNDCXDNSDEQGCSCPAQTFRCSNGKCLSKSQQCNGKDDCGDGSDEASCPKVNVVTCTKHTYRCLNGLCLSKGNPECDGKEDCSDGSDEKDCDCGLRSFTRQARVVGGTDADEGEWPWQVSLHALGQGTSXGASLISPNWLVSAAHCYIDDRGFRYSDPTQXTAFLGLHDQSQRSXLGCRSAGSSASSPTPSSMTSPSTMTSRCWSWRNRQSTAPWCGPSACRTPPMSSLPARPSGSRAGDTPSMEALAR

SEQ ID NO: 1194 - protein, 51 aa, Homo sapiens
RTLCHLTTLDELSCQRENLMFKEHFPLADVTAGFVFHMCFSYTHLNAFKHL

SEQ ID NO: 1195 - protein, 269 aa, Homo sapiens
  SITE (245): Xaa equals any of the naturally occurring L-amino acids
  SITE (246): Xaa equals any of the naturally occurring L-amino acids
  SITE (257): Xaa equals any of the naturally occurring L-amino acids
  SITE (266): Xaa equals any of the naturally occurring L-amino acids
PAEDAASLTWGVAIRAGRSWFSGPAAPAAAMSFFPELYFNVDNGYLEGLVRGLKAGVLSQADYLNLVQCETLEDLKLHLQSTDYGNFLANEASPLTVSVIDDRLKEKMVVEFRHMRNHAYEPLASFLDFITYSYMIDNVILLITGTLHQRSIAELVPKCHPLGSFEQMEAVNIAQTPAELYNAILVDTPLAAFFQDCISEQDLDEMNIEIIRNTLYKAYLESFYKFCTLLGGTTADAMCPILEFXXQTVPSSFHTVXGSTLRAWRXGSG

SEQ ID NO: 1196 - protein, 301 aa, Homo sapiens
RHEPAPREAPGSRASAFLLPSFLPGPRLVPAGHPTATMFVPCGESAPDLAGFTLLMPAVSVGNVGQLAMDLIISTLNMSKIGYFYTDCLVPMVGNNPYATTEGNSTELSINAEVYSLPSRKLVALQLRSIFIKYKSKPFCEKLLSWVKSSGCARVIVLSSSHSYQRNDLQLRSTPFRYLLTPSMQKSVQNKIKSLNWEEMEKSRCIPEIDDSEFCIRIPGGGITKTLYDESCSKEIQMAVLLKFVSEGDNIPDALGLVEYLNEWLQILKPLSDDPTVSASRWKIPSSWRLLFGSGLPPALF

SEQ ID NO: 1197 - protein, 246 aa, Homo sapiens
  SITE (49): Xaa equals any of the naturally occurring L-amino acids
  SITE (65): Xaa equals any of the naturally occurring L-amino acids
  SITE (230): Xaa equals any of the naturally occurring L-amino acids
GTRDLLLAAAAATGKLKSFARKFINLNEFTTYGSEESTKPASVRALLFXISFLMLCHVAQTYGSXVILSESRTGAEVPFFETWMQTCMPEEGKILNPDHPCFRPDSTKVESLVALLNNSSEMKLVQMKWHEACLSISAAILEILNAWENGVLAFESIQKITDNIKGKVCSLAVCAVAWLVAHVRMLGLDEREKSLQMIRQLAGPLFSENTLQFYNERVVIMNSILGAHVXRRAAADSHAGFKFPSN

SEQ ID NO: 1198 - protein, 465 aa, Homo sapiens
  SITE (203): Xaa equals any of the naturally occurring L-amino acids
  SITE (460): Xaa equals any of the naturally occurring L-amino acids
  SITE (461): Xaa equals any of the naturally occurring L-amino acids
KNMETEQPEETFPNTETNGEFGKRPAEDMEEEQAFKRSRNTDEMVELRILLQSKNAGAVIGKGGKNIKALRTDYNASVSVPDSSGPERILSISADIETIGEILKKIIPTLEEGLQLPSPTATSQLPLESDAVECLNYQHYKGSDFDCELRLLIHQSLAGGIIGVKGAKIKELRENTQTTIKLFQECCPHSTDRVVLIGGKPDXVVECIKIILDLISESPIKGRAQPYDPNFYDETYDYGGFTMMFDDRRGRPVGFPMRGRGGFDRMPPGRGGRPMPPSRRDYDDMSPRRGPPPPPPGRGGRGGSRARNLPLPPPPPPRGGDLMAYDRRGRPGDRYDGMVGFSADETWDSAIDTWSPSEWQMAYEPQGGSGYDYSYAGGRGSYGDLGGPIITTQVTIPKDLAGSIIGKGGQRIKQIRHESGASIKIDEPLEGSEDRIITITGTQDQIQNAQYLLQNSVSSXXLALC

SEQ ID NO: 1199 - protein, 446 aa, Homo sapiens
  SITE (6): Xaa equals any of the naturally occurring L-amino acids
  SITE (87): Xaa equals any of the naturally occurring L-amino acids
  SITE (88): Xaa equals any of the naturally occurring L-amino acids
YPAACXTGPEFPGRPTRPHEMDQYWGIGSLASGINLFTNSFEGPVLDHRYYAGGCSPHYILNTRFRKPYNVESYTPQTQGKYEFILXXYESYSDFERNVTEKMASKSGFSFGFKIPGIFELGISSQSDRGKHYIRRTKRFSHTKSVFLHARSDLEVAHYKLKPRSLMLHYEFLQRVKRLPLEYSYGEYRDLFRDFGTHYITEAVLGGIYEYTLVMNKEAMERGDYTLNNVHACAKNDFKIGGAIEEVYVSLGVSVGKCRGILNEIKDRNKRDTMVEDLVVLVRGGASEHITTLAYQELPTADLMQEWGDAVQYNPAIIKVKVEPLYELVTATDFAYSSTVRQNMKQALEEFQKEVSSCHCAPCQGNGVPVLKGSRCDCICPVGSQGLACEVSYRKNTPIDGKWNCWSNWSSCSGRRKTRQRQCNNPPPQNGGSPCSGPASETLDCS

SEQ ID NO: 1200 - protein, 437 aa, Homo sapiens
LGSSDSYASPGRAAAPPAAAGPGDTSACYKSSGPRCLLPDLAPSSEPGACLGGLSVFTMEQLSSANTRFALDLFLALSENNPAGNIFISPFSISSAMAMVFLGTRGNTAAQLSKTFHFNTVEEVHSRFQSLNADINKRGASYILKLANRLYGEKTYNFLPEFLVSTQKTYGADLASVDFQHASEDARKTINQWVKGQTEGKIPELLASGMVDNMTKLVLVNAIYFKGNWKDKFMKEATTNAPFRLNKKDRKTVKMMYQKKKFAYGYIEDLKCRVLELPYQGEELSMVILLPDDIEDESTGLKKIEEQLTLEKLHEWTKPENLDFIEVNVSLPRFKLEESYTLNSDLARLGVQDLFNSSKADLSGMSGARDIFISKIVHKSFVEVNEEGTEAAAATAGIATFCMLMPEENFTADHPFLFFIRHNSSGSILFLGRFSSP

SEQ ID NO: 1201 - protein, 82 aa, Homo sapiens
  SITE (82): Xaa equals any of the naturally occurring L-amino acids
QLGPVVGGWYKVLDRFIPGTTKVDALKKMLLDQGGFAPCFLGCFLPLVGALNGLSAQDNWPNYSGIILMPLSPTTIYGLLCX

SEQ ID NO: 1202 - protein, 126 aa, Homo sapiens
ISRSSARRQPFRHGRLWRAAAMALRYPMAVGLNKGHKVTKNVSKPRHSRRRGRLTKHTKFVRDMIREVCGFAPYERRAMELLKVSKDKRALKFIKKRVGTHIRAKRKREELSNVLAAMRKAAAKKD

SEQ ID NO: 1203 - protein, 130 aa, Homo sapiens
  SITE (27): Xaa equals any of the naturally occurring L-amino acids
DWNPDLQASAVCIKRVGESGPLAQEPXLLKEGFKAKWVCQRCCLPFLEMLISLSKTEKSRCYRNNLVCCINCSWAWSSIPTLRFPASLCCPGSHSCRRPNPLAVFCLKIWGAPSLSSPGNSLAEGGDPPQ

SEQ ID NO: 1204 - protein, 228 aa, Homo sapiens
  SITE (189): Xaa equals any of the naturally occurring L-amino acids
  SITE (196): Xaa equals any of the naturally occurring L-amino acids
  SITE (199): Xaa equals any of the naturally occurring L-amino acids
  SITE (225): Xaa equals any of the naturally occurring L-amino acids
  SITE (228): Xaa equals any of the naturally occurring L-amino acids
WAAFEPATLAWKFPFQSGFCLLLPSPSPRYLFTSHLISLCSSVSPTHIIGDSGGSLTSLLSNARPSGLASVASHIDVTLELLPQRGRRDRLSPHLPPYSPLYSRFDHLSPSAAPSHFGQSQAPIRLPPPPGAPSISLSPLPQNLCKGYERDPLPSRPPLRAVRSKKQKLVGGWLGLCPVPRWDKLAFSXIPSWVPXSFXAPGARTHCAVFLFSFVGKGTKVFAKXPVX

SEQ ID NO: 1205 - protein, 270 aa, Homo sapiens
  SITE (128): Xaa equals any of the naturally occurring L-amino acids
LPGAVAASSGSPPGSALAAVASGGDLFPGQPVSELIAQLLRAEPYPAAAGRFGAGGGAAGAVLGIDNVCELAARLLFSTVEWARHAPFFPELPVADQVALLRLSWSELFVLNAAQAALPLHTAPLLAXAGLHAAPMAAERAVAFMDQVRAFQEQVDKLGRLQVDSAEYGCLKAIALFTPDACGLSDPAHVESLQEKAQVALTEYVRAQYPSQPQRFGRLLLRLPALRAVPASLISQLFFMRLVGKTPIETLIRDMLLSGSTFNWPYGSGQ

SEQ ID NO: 1206 - protein, 89 aa, Homo sapiens
MFHCSDKYFTFFSVHQRERDPPTAVTSKCSCSINGVTDTEVHSWFLSRVVILVSWSLGHWGCTLKSPNRLAIKINKAAAPFQFTFHLTQ

SEQ ID NO: 1207 - protein, 145 aa, Homo sapiens
  SITE (137): Xaa equals any of the naturally occurring L-amino acids
CVGKAGVELGCSGEGVVKKASSRGHKARFPLRSHKVLSPAPGAGGVHGPGFTSTHPAHPRGEGPRAPGPAADRILCKLCSVHCKTPAQLAGHMQTHLGGAAPLSRETPPSHSPPAEGDPRTHQVLVRFVQWRRQRQXRQRQQRQQ

SEQ ID NO: 1208 - protein, 378 aa, Homo sapiens
SASRATAMSSRGGKKKSTKTSRSAKAGVIFPVGRMLRYIKKGHPKYRIGVGAPVYMAAVLEYLTAEILELAGNAARDNKKGRVTPRHILLAVANDEELNQLLKGVTIASGGVLPNIHPELLAKKRGSKGKLEAIITPPPAKKAKSPSQKKPVSKKAGGKKGARKSKKQGEVSKAASADSTTEGTPADGFTVLSTKSLFLGQKLNLIHSEISNLAGFEVEAIINPTNADIDLKDDLGNTLEKKGGKEFVEAVLELRKKNGPLEVAGAAVSAGHGLPAKFVIHCNSPVWGADKCEELLEKTVKNCLALADDKKLKSIAFPSIGSGRNGFPKQTAAQLILKAISSYFVSTMSSSIKTVYFVLFDSESIGIYVQEMAKLDAN

SEQ ID NO: 1209 - protein, 220 aa, Homo sapiens
  SITE (6): Xaa equals any of the naturally occurring L-amino acids
  SITE (10): Xaa equals any of the naturally occurring L-amino acids
  SITE (27): Xaa equals any of the naturally occurring L-amino acids
RGGKIXDTFXRYARRYRSGIPGSTHAXAPGAMRLSLPLLLLLLGAWAIPGGLGDRAPLTATAPQLDDEEMYSAHMPAHLRCDACRAVAYQMWQNLAKAETKLHTSNSGGRRELSELVYTDVLDRSCSRNWQDYGVREVDQVKRLTGPGLSEGPEPSISVMVTGGPWPTRLSRTCLHYLGEFGEDQIYEAHQQGRGALEALLCGGPQGACSEKVSATREEL

SEQ ID NO: 1210 - protein, 231 aa, Homo sapiens
ALSPAMVVPEDQLTRWHPRFNVDEVPDIEPAALPQPPATEKLTTAQEVLARARNLISPRMEKALSQLALRSAAPSSPGSPRPALPATPPATPPAASPSALKGVSQDLLERIRAKEAQKQLAQMTRCPEQEQRLQRLERLPELARVLRSVFVSERKPALSMEVACARMVGSCCTIMSPGEMEKHLLLLSELLPDWLSLHRIRTDTYVKLDKAADLAHITARLAHQTRAEEGL

SEQ ID NO: 1211 - protein, 346 aa, Homo sapiens
NCTTISLVYLHFVFYNSYSLFPSKENCVYETVVLPLDERAFEKTLTPIIQEYFEHGDTNEVAEMLRDLNLGEMKSGVPVLAVSLALEGKASHREMTSKLLSDLCGTVMSTTDVEKSFDKLLKDLPELALDTPRAPQLVGQFIARAVGDGILCNTYIDSYKGTVDCVQARAALDKATVLLSMSKGGKRKDSVWGSGGGQQSVNHLVKEIDMLLKEYLLSGDISEAEHCLKELEVPHFHHELVYEAIIMVLESTGESTFKMILDLLKSLWKSSTITVDQMKRGYERIYNEIPDINLDVPHSYSVLERFVEECFQAGIISKQLRDLCPSRGRKRFVSEGDGGRLKPESY

SEQ ID NO: 1212 - protein, 175 aa, Homo sapiens
  SITE (3): Xaa equals any of the naturally occurring L-amino acids
  SITE (63): Xaa equals any of the naturally occurring L-amino acids
PRXIVSAACGRNHTLALTETGSVFAFGENKMGQLGLGNQTDAVPSPAQIMYNGQPITKMACGXEFSMIMDCKGNLYSFGCPEYGQLGHNSDGKFIARAQRIEYDCELVPRRVAIFIEKTKDGQILPVPNVVVRDVACGANHTLVLDSQKRVFSWGFGGYGRLGTQSRRMRWSPAW

SEQ ID NO: 1213 - protein, 127 aa, Homo sapiens
  SITE (41): Xaa equals any of the naturally occurring L-amino acids
CFICVWCKRKLDQINLQLMSPNANTGTHMHTPINTHTVHLXKGQVISHPNFTSTDPLAPTPASTVTSKARATCAHQTCIKQLAGDGCGAGGLSDGSLLLPLLRVKLLSFLRVYLCQVCAFNCFYFVF

SEQ ID NO: 1214 - protein, 146 aa, Homo sapiens
CTWNRCSASPAGWQNSFLGHLNPSSLLQNPPANRIGMGATLDIQRQQRMELLDRQLMFSQFAQGRRQRQQQGGMINWNRLFPPLRQRQNVNYQGGRQSEPAAPPLEVSEEQVARLMEMGFSRGDALEALRASNNDLNVATNFLLQH

SEQ ID NO: 1215 - protein, 116 aa, Homo sapiens
  SITE (107): Xaa equals any of the naturally occurring L-amino acids
  SITE (108): Xaa equals any of the naturally occurring L-amino acids
LKNHQKTHTSEKSYKCNECRKAFSYCSGLIQCQVIHTIEKPYEYGKCGKAFRQRTDLKKHQKMHTEEKPYECNECGKAFSQSTYLTKHQKIHSEEKSNIHTECGETXXQNSSFLQQ

SEQ ID NO: 1216 - protein, 201 aa, Homo sapiens
AAGGEGFGSLHASLVGFRGVVAGCARHFRASRNGVANGLQSNMPKFYCDYCDTYLTHDSPSVRKTHCSGRKHKENVKDYYQKWMEEQAQSLIDKTTAAFQQGKIPPTPFSAPPPAGAMIPPPPSLPGPPRPGMMPAPHMGGPPMMPMMGPPPPGMMPVGPAPGMRPPMGGHMPMMPGPPMMRPPARPMMVPTRPGMTRPDR

SEQ ID NO: 1217 - protein, 473 aa, Homo sapiens
KFTMKFLLILLLQATASGALPLNSSTSLEKNNVLFGERYLEKFYGLEINKLPVTKMKYSGNLMKEKIQEMQHFLGLKVTGQLDTSTLEMMHAPRCGVPDVHHFREMPGGPVWRKHYITYRINNYTPDMNREDVDYAIRKAFQVWSNVTPLKFSKINTGMADILVVFARGAHGDFHAFDGKGGILAHAFGPGSGIGGDAHFDEDEFWTTHSGGTNLFLTAVHEIGHSLGLGHSSDPKAVMFPTYKYVDINTFRLSADDIRGIQSLYGDPKENQRLPNPDNSEPALCDPNLSFDAVTTVGNKIFFFKDRFFWLKVSERPKTSVNLISSLWPTLPSGIEAAYEIEARNQVFLFKDDKYWLISNLRPEPNYPKSIHSFGFPNFVKKIDAAVFNPRFYRTYFFVDNQYWRYDERRQMMDPGYPKLITKNFQGIGPKIDAVFYSKNKYYYFFQGSNQFEYDFLLQRITKTLKSNSWFGC

SEQ ID NO: 1218 - protein, 598 aa, Homo sapiens
  SITE (9): Xaa equals any of the naturally occurring L-amino acids
  SITE (144): Xaa equals any of the naturally occurring L-amino acids
ATSRQPSYXRTWCRRCCLPLALNPVPAAMAPGQLALFSVSDKTGLVEFARNLTALGLNLVASGGTAKALRDAGLAVRDVSELTGFPEMLGGRVKTLHPAVHAGILARNIPEDNADMARLDFNLIRVVACNLYPFVKTVASPGVXVEEAVEQIDIGGVTLLRAAAKNHARVTVVCEPEDYVVVSTEMQSSESKDTSLETRRQLALKAFTHTAQYDEAISDYFRKQYSKGVSQMPLRYGMNPHQTPAQLYTLQPKLPITVLNGAPGFINLCDALNAWQLVKELKEALGIPAAASFKHVSPAGAAVGIPLSEDEAKVCMVYDLYKTLTPISAAYARARGADRMSSFGDFVALSDVCDVPTAKIISREVSDGIIAPGYEEEALTILSKKKNGNYCVLQMDQSYKPDENEVRTLFGLHLSQKRNNGVVDKSLFSNVVTKNKDLPESALRDLIVATIAVKYTQSNSVCYAKNGQVIGIGAGQQSRIHCTRLAGDKANYWWLRHHPQVLSMKFKTGVKRAEISNAIDQYVTGTIGEDEDLIKWKALFEEVPELLTEAEKKEWVEKLTEVSISSDAFFPFRDNVDRAKRSGVAYIAAPPVLLLTKL

SEQ ID NO: 1219 - protein, 209 aa, Homo sapiens
YTAIMSIMSYNGGAVMAMKGKNCVAIAADRRFGIQAQMVTTDFQKIFPMGDRLYIGLAGLATDVQTVAQRLKFRLNLYELKEGRQIKPYTLMSMVANLLYEKRFGPYYTEPVIAGLDPKTFKPFICSLDLIGCPMVTDDFVVSGTCAEQMYGMCESLWEPNMDPDHLFETISQAMLNAVDRDAVSGMGVIVHIIEKDKITTRTLKARMD

SEQ ID NO: 1220 - protein, 140 aa, Homo sapiens
  SITE (51): Xaa equals any of the naturally occurring L-amino acids
  SITE (64): Xaa equals any of the naturally occurring L-amino acids
  SITE (77): Xaa equals any of the naturally occurring L-amino acids
IISIISTSNKIKMSEAPRFFVGPEDTEINPGNYRHFFHHADEDDEEEDDSXPERQIVVGICSMXKKSKSKPMKEILXRISLFKYITVVVFEEEVILNEPVENWPLCDCLISFHSKGFPLDKAVAYAKLRNPFVINDLNMQ

SEQ ID NO: 1221 - protein, 45 aa, Homo sapiens
GLMEIEITCKDITVFMSYILVLEIVECMIDNIFLIFIFSSNTSTV

SEQ ID NO: 1222 - protein, 70 aa, Homo sapiens
VAYICYSKFCKYANQLYRFITSFLGFFWGRVIILLKITMNTLTVRICGKVPLNITKIISLEGRNNHSNEL

SEQ ID NO: 1223 - protein, 88 aa, Homo sapiens
FYPSTYLKAPSSLVCGVLEPVSSFWRFKLNSNNYVTQSMWRKSETSHGDAGPRARPAVWPALLTSVSRSFPSHEVPSGHGDEGREGTG

SEQ ID NO: 1224 - protein, 298 aa, Homo sapiens
  SITE (279): Xaa equals any of the naturally occurring L-amino acids
ATRRRAAEAGMAAVLQRVERLSNRVVRVLGCNPGPMTLQGTNTYLVGTGPRRILIDTGEPAIPEYISCLKQALTEFNTAIQEIVVTHWHRDHSGGIGDICKSINNDTTYCIKKLPRNPQREEIIGNGEQQYVYLKDGDVIKTEGATLRVLYTPGHTDDHMALLLEEENAIFSGDCILGEGTTVFEDLYDYMNSLKELLKIKADIIYPGHGPVIHNAEAKIQQYISHRNIREQQILTLFRENFEKSFTVMELVKIIYKNTPENLHEMAKHNLLLHLKKLXKEGKIFSNTDPDKKWKAHL

SEQ ID NO: 1225 - protein, 27 aa, Homo sapiens
VSGDYGHPVYIVQDGPPQSPPNIYYKV

SEQ ID NO: 1226 - protein, 380 aa, Homo sapiens [sequence omitted]

SEQ ID NO: 1227 - protein, 78 aa, Homo sapiens
  SITE (26): Xaa equals any of the naturally occurring L-amino acids
FNSLKCLFGIMIGNLDEFRGKKLSAXMLRAHLSPHTPTELTGLQCFIRKFPIPLSCVFMLKILLHFSFECQFLTSTIS

SEQ ID NO: 1228 - protein, 222 aa, Homo sapiens
  SITE (142): Xaa equals any of the naturally occurring L-amino acids
ANEKVALQKALLYYESIHGRPVTKNERQVMKPLYDRYRLVKQILSRANTIPIIGSPSSKRRSPLLQPIIEGETASFFKEIKEEEEGSEDDSNVKPDFMVTLKTDFSARCFLDQFEDDADGFISPMDDKIPSKCSQDTGLSNXHAASIPELLEHLQEMREEKKRIRKKLRDFEDNFFRQNGRNVQKEDRTPMAEEYSEYKHIKAKLRLLEVLISKRDTDSKSM

SEQ ID NO: 1229 - protein, 220 aa, Homo sapiens [sequence omitted]

SEQ ID NO: 1230 - protein, 183 aa, Homo sapiens
  SITE (11): Xaa equals any of the naturally occurring L-amino acids
  SITE (12): Xaa equals any of the naturally occurring L-amino acids
  SITE (19): Xaa equals any of the naturally occurring L-amino acids
  SITE (30): Xaa equals any of the naturally occurring L-amino acids
ELKRLTIGKNXXRLTGNRXGIPGSTHASEXEVEEEGDVDSDEEEEEDEESSSEGLEAEDWAQGVVEAGGSFGAYGAQEEAQCPTLHFLEGGEDSDSDSEEEDDEEEDDEDEDDDDDEEDGDEVPVPSFGEAMAYFAMVKRYLTSFPIDDRVQSHILHLEHDLVHVTRKNHARQAGVRGLGHQS

SEQ ID NO: 1231 - protein, 59 aa, Homo sapiens
NLYKLKLNHELQKKSILPKLDVTTLTSLKYEVDCLKDSAYILVCTFRNIFLGKSTQHFL

SEQ ID NO: 1232 - protein, 135 aa, Homo sapiens [sequence omitted]

SEQ ID NO: 1233 - protein, 134 aa, Homo sapiens
RGETREMAGNLLSGAGRRLWDWVPLACRSFSLGVPRLIGIRLTLPPPKVVDRWNEKRAMFGVYDNIGILGNFEKHPKELIRGPIWLRGWKGNELQRCIRKRKMVGSRMFADDLHNLNKRIRYLYKHFNRHGKFR

SEQ ID NO: 1234 - protein, 282 aa, Homo sapiens
  SITE (8): Xaa equals any of the naturally occurring L-amino acids
  SITE (18): Xaa equals any of the naturally occurring L-amino acids
TGPEFPGXPTRPRTAAAXSARTRTRGSPRMGEFNEKKTTCGTVCLKYLLFTYNCCFWLAGLAVMAVGIWTLALKSDYISLLASGTYLATAYILVVAGTVVMVTGVLGCCATFKERRNLLRLYFILLLIIFLLEIIAGILAYAYYQQLNTELKENLKDTMTKRYHQPGHEAVTSAVDQLQQEFHCCGSNNSQDWRDSEWIRSQEAGGRVVPDSCCKTVVALCGQRDHASNIYKVEGGCITKLETFIQEHLRVIGAVGIGIACVQVFGMIFTCCLYRSLKLEHY

SEQ ID NO: 1235 - protein, 66 aa, Homo sapiens
AEIQVFQVGLVSWGLYNPCLGSADKNSRKRAPRSKVPPPRDFHINLFRMQPWLRQHLGDVLNFLPL

SEQ ID NO: 1236 - protein, 108 aa, Homo sapiens
ARRRRGGWAGGGGGTRRALGVPVARRRRMWRAEGKWLPKTSRKSVSQSVFCGTSTYCVLNTVPPIEDDHGNSNSSHVKIFLPKKLLECLPKCSSLPKERHRWNTNERS

SEQ ID NO: 1237 - protein, 116 aa, Homo sapiens
RGGGSKGNEVRPVAGSAESAALRLRAPLQQVQAQLSPLQNISPWILAVLTLQIQSLISCWAFWTTWTQSCSSNALPQSLPAWRSSQRSTQKDPVPYQPPFLCQWGRHQPSWKPLMN

SEQ ID NO: 1238 - protein, 311 aa, Homo sapiens
  SITE (16): Xaa equals any of the naturally occurring L-amino acids
VTSEGVRVRSSRGRAXGVWRFERDEDGTGAGCGQWTRFCREPKMAVNVYSTSVTSDNLSRHDMLAWINESLQLNLTKIEQLCSGAAYCQFMDMLFPGSIALKKVKFQAKLEHEYIQNFKILQAGFKRMGVDKIIPVDKLVKGKFQDNFEFVQWFKKFFDANYDGKDYDPVAARQGQETAVAPSLVAPALNKPKKPLTSSSAAPQRPISTQRTAAAPKAGPGVVRKNPGVGNGDDEAAELMQQVNVLKLTVEDLEKERDFYFGKLRNIELICQENEGENDPVLQRIVDILYATDEGFVIPDEGGPQEEQEEY

SEQ ID NO: 1239 - protein, 345 aa, Homo sapiens
AARLAVEMKTDLLIVLSDVEGLFDSPPGSDDAKLIDIFYPGDQQSVTFGTKSRVGMGGMEAKVKAALWALQGGTSVVIANGTHPKVSGHVITDIVEGKKVGTFFSEVKPAGPTVEQQGEMARSGGRMLATLEPEQRAEIIHHLADLLTDQRDEILLANKKDLEEAEGRLAAPLLKRLSLSTSKLNSLAIGLRQIAASSQDSVGRVLRRTRIAKNLELEQVTVPIGVLLVIFESRPDCLPQVAALAIASGNGLLLKGGKEAAHSNRILHLLTQEALSIHGVKEAVQLVNTREEVEDLCRLDKMIDLIIPRGSSQLVRDIQKAAKGIPVMGHSEGICAHVCGFRGQC

SEQ ID NO: 1240 - protein, 87 aa, Homo sapiens
GYCFISTSRTPKETIWVKATSTALALHRFLEFLSFTFSLTQHCLLFVFVAWFVFFLPCSPNLCPNSFGLMQKYLCGREELFSWRAFR

SEQ ID NO: 1241 - protein, 196 aa, Homo sapiens
RAGSPASPAHVAWPPAPTWSRALPRVAPRSSSRRGRRYPERSQRRREVAATAMPKNKGKGGKNRRRGKNENESEKRELVFKEDGQEYAQVIKMLGNGRLEAMCFDGVKRLCHIRGKLRKKVWINTSDIILVGLRDYQDNKADVILKYNADEARSLKAYGELPEHAKINETDTFGPGDDDEIQFDDIGDDDEDIDDI

SEQ ID NO: 1242 - protein, 218 aa, Homo sapiens
  SITE (3): Xaa equals any of the naturally occurring L-amino acids
  SITE (7): Xaa equals any of the naturally occurring L-amino acids
AVXFKDXIYEIFQKLNTSIQVVLLSATMPTDVLEVTKKFMRDPIRILVKKEELTLEGIKQFYINVEREEWKLDTLCDLYETLTITQAVIFLNTRRKVDWLTEKMHARDFTVSALHGDMDQKERDVIMREFRSGSSRVLITTDLLARGIDVQQVSLVINYDLPTNRENYIHRIGRGGRFGRKGVAINFVTEEDKRILRDIETFYNTTVEEMPMNVADLI

SEQ ID NO: 1243 - protein, 173 aa, Homo sapiens
LDGSARAELALSVAVNVAPGRLCAGRYSSDVQEMILSSATADRIPIAVSGVRGMGFLMRHHIETGGGQLPAKLSSLFVKCLQNPSSDIRLVAEKMIWWANKDPLPPLDPQAIKPILKALLDNTKDKNTVVRAYSDQAIVNLLKMRQGEEVFQSLSKILDVASLEVLNEVNRSP

SEQ ID NO: 1244 - protein, 222 aa, Homo sapiens
  SITE (17): Xaa equals any of the naturally occurring L-amino acids
  SITE (72): Xaa equals any of the naturally occurring L-amino acids
YIKIYQGEELPHPKSMXQATAEANNLAAVATAKDTYNKKMEEICGGDKPFLAPNDLQTKHLQLKEESVKLFXGVKKMGGEEFSRRYLQQLESEIDELYIQYIKHNDSKNIFHAARTPATLFVVIFITYVIAGVTGFIGLDIIASLCNMIMGLTLITLCTWAYIRYSGEYRELGAVIDQVAAALWDQALYKLYSAAATHRHLYHQAFPTPKSESTEQSEKKKM

SEQ ID NO: 1245 - protein, 278 aa, Homo sapiens
SAEDVEFQKEVAQVRKRITQRKKQEQLTPGVVYVRHLPNLLDETQIFSYFSQFGTVTRFRLSRSKRTGNSKGYAFVEFESEDVAKIVAETMNNYLFGERLLECHFMPPEKVHKELFKDWNIPFKQPSYPSVKRYNRNRTLTQKLRMEERFKKKERLLRKKLAKKGIDYDFPSLILQKTESISKTNRQTSTKGQVLRKKKKKVSGTLDTPEKTVDSQGPTPVCTPTFLERRKSQVAELNDDDKDDEIVFKQPISCVKEEIQETQTPTHSRKKRRRSSNQ

SEQ ID NO: 1246 - protein, 121 aa, Homo sapiens
  SITE (100): Xaa equals any of the naturally occurring L-amino acids
SPPPLSLILLSPIKAKYGLTTSPKSVLRPSLCLCALLGVSQRSGQDCAGPASPCASQEHRQGVLVAVAGHLSPSSLLNVLTARGNGVSFPTKKPLLYIFXLQSHRLQTTLLFFMDFSAHFR

SEQ ID NO: 1247 - protein, 36 aa, Homo sapiens
IFHRVLLCDLNFSLGPASDIVGGLSWFQEIRLAFSS

SEQ ID NO: 1248 - protein, 184 aa, Homo sapiens
WIPRACREFGTRFGGVTRGFNMRIEKCYFCSGPIYPGHGMMFVRNDCKVFRFCKSKCHKNFKKKRNPRKVRWTKAFRKAAGKELTVDNSFEFEKRRNEPIKYQRELWNKTIDAMKRVEEIKQKRQAKFIMNRLKKNKELQKVQDIKEVKQNIHLIRAPLAGKGKQLEEKMVQQLQEDVDMEDAP

SEQ ID NO: 1249 - protein, 188 aa, Homo sapiens
  SITE (104): Xaa equals any of the naturally occurring L-amino acids
GCPAHSPGSAKRWTQAAMSRPRMRLVVTADDFGYCPRRDEGIVEAFLAGAVTSVSLLVNGAATESAAELARRHSIPTGLHANLSEGRPVGPARRGASSLLGPEXFFLGKMGFREAVAAGDVDLPQVRSRSYRRMLARTPRAPPGGTVRPLELAVDDFRIQTLEPSHGSTRRVSSAATPGRSRCLSLAL

SEQ ID NO: 1250 - protein, 201 aa, Homo sapiens
  SITE (36): Xaa equals any of the naturally occurring L-amino acids
  SITE (96): Xaa equals any of the naturally occurring L-amino acids
  SITE (97): Xaa equals any of the naturally occurring L-amino acids
  SITE (101): Xaa equals any of the naturally occurring L-amino acids
RKNLEIYEAVTSPQGPAMTWSMFAVGWMELKDACGXRGLLDRSFANMAEPFKVWTENADGSGAVNFLTGMGGFLQAVVFGCTGFRVSVSGIFYQGXXLNFXFSEDSVTVEVTARAGPWAPHLEAELWPSQSRLSLLPGHKVSFPRSAGRIQMSPPKLPGSSSSEFPGRTFSDVRDPLQSPLWVTLGSSSPTESLTVDPASE

SEQ ID NO: 1251 - protein, 266 aa, Homo sapiens
  SITE (16): Xaa equals any of the naturally occurring L-amino acids
SVGSVAAATRTGPVSXKKFREASWRFTFYLIAFIAGMAVIVDKPWFYDMKKVWEGYPIQSTIPSQYWYYMIELSFYWSLLFSIASDVKRKDFKEQIIHHVATIILISFSWFANYIRAGTLIMALHDSSDYLLESAKMFNYAGWKNTCNNIFIVFAIVFIITRLVILPFWILHCTLVYPLELYPAFFGYYFFNSMMGVLQLLHIFWAYLILRMAHKFITGKLVEDERSDREETESSEGEEAAAGGGAKSRPLANGHPILNNNHRKND

SEQ ID NO: 1252 - protein, 163 aa, Homo sapiens
KMGTNKCASQAGMTAYGTRRHLYDPKMQTDKPFDQTTISLQMGTNKGASQAGMLAPGTRRDIYDQKLTLQPVDNSTISLQMGTNKVASQKGMSVYGLGRQVYDPKYCAAPTEPVIHNGSQGTGTNGSEISDSDYQAEYPDEYHGEYQDDYPRDYQYSDQGIDY

SEQ ID NO: 1253 - protein, 298 aa, Homo sapiens
  SITE (109): Xaa equals any of the naturally occurring L-amino acids
LEETPCLRTAVACEQRDPGTESQPRRCCRRRRPETAEPVRPPPPPTPDTEHPVMDKNELVQKAKLAEQAERYDDMAACMKSVTEQGAELSNEERNLLSVAYKNVVGARXSSWRVVSSIEQKTEGAEKKQQMAREYREKIETELRDICNDVLSLLEKFLIPNASQAESKVFYLKMKGDYYRYLAEVAAGDDKKGIVDQSQQAYQEAFEISKKEMQPTHPIRLGLALNFSVFYYEILNSPEKACSLAKTAFDEAIAELDTLSEESYKDSTLIMQLLRDNLTLWTSDTQGDEAEAGEGGEN

SEQ ID NO: 1254 - protein, 173 aa, Homo sapiens
SPARPLIRSDKMKETIMNQEKLAKLQAQVRIGGKGTARRKKKVVHRTATADDKKLQFSLKKLGVNNISGIEEVNMFTNQGTVIHFNNPKVQASLAANTFTITGHAETKQLTEMLPSILNQLGADSLTSLRRLAEALPKQSVDGKAPLATGEDDDDEVPDLVENFDEASKNEAN

SEQ ID NO: 1255 - protein, 66 aa, Homo sapiens
LCCPFHIKELLTTKAAPAFPICLSIWLAGKERTCMLVKEEVGWKKWGGTTVKSRVKPSWPKVSCRL

SEQ ID NO: 1256 - protein, 389 aa, Homo sapiens
AEAGPGARAAAAMAIKFLEVIKPFCVILPEIQKPERKIQFKEKVLWTAITLFIFLVCCQIPLFGIMSSDSADPFYWMRVILASNRGTLMELGISPIVTSGLIMQLLAGAKIIEVGDTPKDRALFNGAQKLFGMIITIGQSIVYVMTGMYGDPSEMGAGICLLITIQLFVAGLIVLLLDELLQKGYGLGSGISLFIATNICETIVWKAFSPTTVNTGRGMEFEGAIIALFHLLATRTDKVRALREAFYRQNLPNLMNLIATIFVFAVVIYFQGFRVDLPIKSARYRGQYNTYPIKLFYTSNIPIILQSALVSNLYVISQMLSARFSGNLLVSLLGTWSDTSSGGPARAYPVGGLCYYLSPPWSMNSTGTSPQPRPLVGCASGPSRSWLTS

SEQ ID NO: 1257 - protein, 191 aa, Homo sapiens
  SITE (2): Xaa equals any of the naturally occurring L-amino acids
GXPSSSRAHSPMIAVGSDDSSPNAMAKVQIFEYNENTRKYAKAETLMTVTDPVHDIAFAPNLGRSFHILAIATKDVRIFTLKPVRKELTSSGGPTKFEIHIVAQFDNHNSQVWRVSWNITGTVLASSGDDGCVRLWKANYMDNWKCTGILKGNGSPVNGSSQQGTSNPSLGSNIPSLQNSLNGSSAGRKHS

SEQ ID NO: 1258 - protein, 458 aa, Homo sapiens
PGARHGSASAPTLFPLVSCENSPSDTSSVAVGCLAQDFLPDSITFSWKYKNNSDISSTRGFPSVLRGGKYAATSQVLLPSKDVMQGTDEHVVCKVQHPNGNKEKNVPLPVIAELPPKVSVFVPPRDGFFGNPRKSKLICQATGFSPRQIQVSWLREGKQVGSGVTTDQVQAEAKESGPTTYKVTSTLTIKESDWLSQSMFTCRVDHRGLTFQQNASSMCVPDQDTAIRVFAIPPSFASIFLTKSTKLTCLVTDLTTYDSVTISWTRQNGEAVKTHTNISESHPNATFSAVGEASICEDDWNSGERFTCTVTHTDLPSPLKQTISRPKGVALHRPDVYLLPPAREQLNLRESATITCLVTGFSPADVFVQWMQRGQPLSPEKYVTSAPMPEPQAPGRYFAHSILTVSEEEWNTGETYTCVVAHEALPNRVTERTVDKSTGKPTLYNVSLVMSDTAGTCY

SEQ ID NO: 1259 - protein, 247 aa, Homo sapiens
  SITE (25): Xaa equals any of the naturally occurring L-amino acids
AGPAPEEPRGGAAARWDCQPCQAAXVVENSAQRVIHLAGQWEKHRVPLLAEYRHLRKLQDCRELESSRRLAEIQELHQSVRAAAEEARRKEEVYKQLMSELETLPRDVSRLAYTQRILEIVGNIRKQKEEITKILSDTKELQKEINSLSGKLDRTFAVTDELVFKDAKKDDAVRKAYKYLAALHENCSQLIQTIEDTGTIMREVRDLEEQIETELGKKTLSNLEKIREDYRALRQENAGLLGRVREA

SEQ ID NO: 1260 - protein, 62 aa, Homo sapiens
VGIKWIEEAVLCANVSFASDRYLFVIRRVASFHLGAENSRQLLTDKFNLHLQYCMLGISAYF

SEQ ID NO: 1261 - protein, 243 aa, Homo sapiens
  SITE (76): Xaa equals any of the naturally occurring L-amino acids
  SITE (210): Xaa equals any of the naturally occurring L-amino acids
  SITE (226): Xaa equals any of the naturally occurring L-amino acids
QERPGNFYVSSESIRKGPPVRPWRDRPQSSIYDPFAGMKTPGQRQLITLQEQVKLGIVNVDEAVLHFKEWQLNQKXRSESFRFQQENLKRLRDSITRRQREKQKSGKQTDLEITVPIRHSQHLPAKVEFGVYESGPRKSVIPPRTELRRGDWKTDSTSSTASSTSNRSSTRSLLSVSSGMEGDNEDNEVPEVTRSRSPGPPQVDGTPTMXLERPPRVPPRAASQRXPTRETFHPPPPVPPRGR

SEQ ID NO: 1262 - protein, 75 aa, Homo sapiens
KYVRNDQNKRKFLFSCKYFSSVITLKYKLKYNTPECLRHDLDFKCVVFIEKKLSTHLVFQENLKRSQGKMICMLK

SEQ ID NO: 1263 - protein, 475 aa, Homo sapiens
  SITE (249): Xaa equals any of the naturally occurring L-amino acids
RTGLGRDVGAGARRAARCRAEAAAAVGTARSPALGMALLVLGLVSCTFFLAVNGLYSSSDDVIELTPSNFNREVIQSDSLWLVEFYAPWCGHCQRLTPEWKKAATALKDVVKVGAVDADKHHSLGGQYGVQGFPTIKIFGSNKNRPEDYQGGRTGEAIVDAALSALRQLVKDRLGGRSGGYSSGKQGRSDSSSKKDVIELTDDSFDKNVLDSEDVWMVEFYAPWCGHCKNLEPEWAAAASEVKEQTKGXVKLAAVDATVNQVLASRYGIRGFPTIKIFQKGESPVDYDGGRTRSDIVSRALDLFSDNAPPPELLEIINEDIAKRTCEEHQLCVVAVLPHILDTGAAGRNSYLEVLLKLADKYKKKMWGWLWTEAGAQSELETALGIGGFGYPAMAAINARKMKFALLKGSFSEQGINEFLRELSFGRGSTAPVGGGAFPTIVEREPWDGRDGELPVEDDIDLSDVELDDLGKDEL

SEQ ID NO: 1264 - protein, 398 aa, Homo sapiens
  SITE (28): Xaa equals any of the naturally occurring L-amino acids
HFERTSSKRVSRSLDGAPIGVMDQSLMXDFPGAAGEISAYGPGLVSIAVVQDGDGRREVRSPTKAPHLQLIEGKSSHETLNIVEEKKRAEVGKDERVITEEMNGKEISPGSGPGEIRKVEPVTQKDSTSLSSESSSSSSESEEEDVGEYRPHHRVTEGTIREEQEYEEEVEEEPRPAAKVVEREEAVPEASPVTQAGASVITVETVIQENVGAQKIPGEKSVHEGALKQDMGEEAEEEPQKVNGEVSHVDIDVLPQIICCSEPPVVKTEMVTISDASQRTEISTKEVPIVQTETKTITYESPQIDGGAGGDSGTLLTAQTITSESVSTTTTTHITKTVKGGISETRIEKRIVITGDGDIDHDQALAQAIREAREQHPDMSVTRVVVHKETELAEEGED

SEQ ID NO: 1265 - protein, 207 aa, Homo sapiens
  SITE (99): Xaa equals any of the naturally occurring L-amino acids
WTGTGRGAVAIMADPDPRYPRSSIEDDFNYGSSVASATVHIRMAFLRKVYSILSLQVLLTTVTSTVFLYFESVRTFVHESPALILLFALGSLGLIFALXLNRHKYPLNLYLLFGFTLLEALTVAVVVTFYDVYIILQAFILTTTVFFGLTVYTLQSKKDFSKFGAGLFALLWILCLSGFLKFFFYSEIMELVLAAAGALLFWGIHHL

SEQ ID NO: 1266 - protein, 289 aa, Homo sapiens [sequence omitted]

SEQ ID NO: 1267 - protein, 284 aa, Homo sapiens
  SITE (5): Xaa equals any of the naturally occurring L-amino acids
  SITE (6): Xaa equals any of the naturally occurring L-amino acids
RGRRXXASLRGWPVRRGMGRVQLFEISLSHGRVVYSPGEPLAGTVRVRLGAPLPFRAIRVTCIGSCGVSNKANDTAWVVEEGYFNSSLSLADKGSLPAGEHSFPFQFLLPATAPTSFEGPFGKIVHQVRAAIHTPRFSKDHKCSLVFYILSPLNLNSIPDIEQPNVASATKKFSYKLVKTGSVVLTASTDLRGYVVGQALQLHADVENQSGKDTSPVVASLLQKVSYKAKRWIHDVRTIAEVEGAGVKAWRRAQWHEQILVPALPQSALPAAASSTSTTTYRSL

SEQ ID NO: 1268 - protein, 254 aa, Homo sapiens
VWLRVENVCQGPGQEGGPPVTMVSMSFKRNRSDRFYSTRCCGCCHVRTGTIILGTWYMVVNLLMAILLTVEVTHPNSMPAVNIQYEVIGNYYSSERMADNACVLFAVSVLMFIISSMLVYGAISYQVGWLIPFFCYRLFDFVLSCLVAISSLTYLPRIKEYLDQLPDFPYKDDLLALDSSCLLFIVLVFFALFIIFKAYLINCVWNCYKYINNRNVPEIAVYPAFEAPPQYVLPTYEMAVKMPEKEPPPPYLPA

SEQ ID NO: 1269 - protein, 67 aa, Homo sapiens
  SITE (17): Xaa equals any of the naturally occurring L-amino acids
  SITE (49): Xaa equals any of the naturally occurring L-amino acids
  SITE (52): Xaa equals any of the naturally occurring L-amino acids
  SITE (53): Xaa equals any of the naturally occurring L-amino acids
KSILVIRVYFFYRTRWXGGEPFTLLVKLNHRKFTICLSQTLAVRGMVAXACXXPACWGGPSWGGLPE

SEQ ID NO: 1270 - protein, 164 aa, Homo sapiens
  SITE (6): Xaa equals any of the naturally occurring L-amino acids
  SITE (10): Xaa equals any of the naturally occurring L-amino acids
  SITE (13): Xaa equals any of the naturally occurring L-amino acids
  SITE (138): Xaa equals any of the naturally occurring L-amino acids
  SITE (152): Xaa equals any of the naturally occurring L-amino acids
  SITE (161): Xaa equals any of the naturally occurring L-amino acids
  SITE (164): Xaa equals any of the naturally occurring L-amino acids
GSPGTXRIPXTRXETCFDKYTGNTYRVGDTYERPKDSMIWDCTCIGAGRGRISCTIANRCHEGGQSYKIGDTWRRPHETGGYMLECVCLGNGKGEWTCKPIAEKCFDHAAGTSYVVGETWEKPYQGWMMVDCTCLGEXSGRITCTSRNRCNXQDTRTSIEXETX

SEQ ID NO: 1271 - protein, 363 aa, Homo sapiens
ARGSECGQRAEAVSHRRRRRAQASSFGWGAAELTSDISAPFTRRNPGAGARSAGVTMTKAGSKGGNLRDKLDGNELDLSLSDLNEVPVKELAALPKATILDLSCNKLTTLPSDFCGLTHLVKLDLSKNKLQQLPADFGRLVNLQHLDLLNNKLVTLPVSFAQLKNLKWLDLKDNPLDPVLAKVAGDCLDEKQCKQCANKVLQHMKAVQADQERERQRRLEVEREAEKKREAKQRAKEAQERELRKREKAEEKERRRKEYDALKAAKREQEKKPKKEANQAPKSKSGSRPRKPPPRKHTRSWAVLKLLLLLLLFGVAGGLVACRVTELQQQPLCTSVNTIYDNAVQGLRRHEILQWVLQTDSQQ

SEQ ID NO: 1272 - protein, 144 aa, Homo sapiens
  SITE (112): Xaa equals any of the naturally occurring L-amino acids
  SITE (116): Xaa equals any of the naturally occurring L-amino acids
  SITE (124): Xaa equals any of the naturally occurring L-amino acids
GLVMAPIACLLPAFSSAPEAMHPWELFVKYYHAKNGRAYVESPARKLSQSFALPVTGGTVVTPKQSLLTAIHMVLTEHDPFKRSADSELKALVCMALNEPASGVLGEPHLQXRVTXRASLPALXLHGTHRLLKIASTCSVASTT

SEQ ID NO: 1273 - protein, 252 aa, Homo sapiens
  SITE (32): Xaa equals any of the naturally occurring L-amino acids
ARAPPRPRRAGRCQLPQRPAEARCMLSRCRSXLLHVLGLSFLLQTRRPILLCSPRLMKPLVVFVLGGPGAGKGTQCARIVEKYGYTHLSAGELLRDERKNPDSQYGELIEKYIKEGKIVPVEITISLLKREMDQTMAANAQKNKFLIDGFPRNQDNLQGWNKTMDGKADVSFVLFFDCNNEICIERCLERGKSSGRSDDNRESLEKRIQTYLQSTKPIIDLYEEMGKVKKIDASKSVDEVFDEVVQIFDKEG

SEQ ID NO: 1274 - protein, 425 aa, Homo sapiens
  SITE (35): Xaa equals any of the naturally occurring L-amino acids
ASERSEARRKLRECDGLVDALIFIVQAEIGQKDSXSKLVENCVCLLRNLSYQVHREIPQAERYQEAAPNVANNTGPHAASCFGAKKGKGKKPIEDPANDTVDFPKRTSPARGYELLFQPEVVRIYISLLKESKTPAILEASAGAIQNLCAGRWTYGRYIRSALRQEKALSAIADLLTNEHERVVKAASGALRNLAVDARNKELIGKHAIPNLVKNLPGGQQNSSWNFSEDTVISILNTINEVIAENLEAAKKLRETQGIEKLVLINKSGNRSEKEVRAAALVLQTIWGYKELRKPLEKEGWKKSDFQVNLNNASRSQSSHSYDDSTLPLIDRNQKSDKKPDREEIQMSNMGSNTKSLDNNYSTPNERGDHNRTLDRSGDLGDMEPLKGTTPLMQDEGQESLEEELDVLVLDDEGGQVSYPSMQKI

SEQ ID NO: 1275 - protein, 111 aa, Homo sapiens
  SITE (10): Xaa equals any of the naturally occurring L-amino acids
FFFSSLFSLXFLKKGKKCIRTPKISKPIKFELSGCTSMKTYRAKFCGVCTDGRCCTPHRTTTLPVEFKCPDGEVMKKNMMFIKTCACHYNCPGDNDIFESLYYRKMYGDMA

SEQ ID NO: 1276 - protein, 766 aa, Homo sapiens
GDFIMLRAGRRAPLPSPPSLDSPGPQLMPSPRPVLLRGARAALLLLLPPRLLARPSLLLRRSLSAASCAPISLPAAASRSSMDGAGAEEVLAPLRLAVRQQGDLVRKLKEDKAPQVDVDKAVAELKARKRVLEAKELALQPKDDIVDRAKMEDTLKRRFFYDQAFAIYGGVSGLYDFGPVGCALKNNIIQTWRQHFIQEEQILEIDCTMLTPEPVLKTSGHVDKFADFMVKDVKNGECFRADHLLKAHLQKLMSDKKCSVEKKSEMESVLAQLDNYGQQELADLFVNYNVKSPITGNDLSPPVSFNLMFKTFIGPGGNMPGYLRPETAQGIFLNFKRLLEFNQGKLPFAAAQIGNSFRNEISPRSGLIRVREFTMAEIEHFVDPSEKDHPKFQNVADLHLYLYSAKAQVSGQSARKMRLGDAVEQGVINNTVLGYFIGRIYLYLTKVGISPDKLRFRQHMENEMAHYACDCWDAESKTSYGWIEIVGCADRSCYDLSCHARATKVPLVAEKPLKEPKTVNVVQFEPSKGAIGKAYKKDAKLVMEYLAICDECYITEMEMLLNEKGEFTIETEGKTFQLTKDMINVKRFQKTLYVEEVVPNVIEPSFGLGRIMYTVFEHTFHVREGDEQRTFFSFPAVVAPFKCSVLPLSQNQEFMPFVKELSEALTRHGVSHKVDDSSGSIGRRYARTDEIGVAFGVTIDFDTVNKTPHTATLRDRDSMRQIRAEISELPSIVQDLANGNITWADVEARYPLFEGQETGKKETIEE

SEQ ID NO: 1277 - protein, 386 aa, Homo sapiens
  SITE (75): Xaa equals any of the naturally occurring L-amino acids
LGSRQAAGTMRGQRSLLLGPARLCLRLLLLLGYRRRCPPLLRGLVQRWRYGKVCLRSLLYNSFGGSDTAVDAAFXPVYWLVDNVIRWFGVVFVVLVIVLTGSIVAIAYLCVLPLILRTYSVPRLCWHFFYSHWNLILIVFHYYQAITTPPGYPPQGRNDIATVSICKKCIYPKPARTHHCSICNRCVLKMDHHCPWLNNCVGHYNHRYFFSFCFFMTLGCVYCSYGSWDLFREAYAAIEKMKQLDKNKLQAVANQTYHQTPPPTFSFRERMTHKSLVYLWFLCSSVALALGALTVWHAVLISRGETSIERHINKKERRRLQAKGRVFRNPYNYGCLDNWKVFLGVDTGRHWLTRVLLPSSHLPHGNGMSWEPPPWVTAHSASVMAV

SEQ ID NO: 1278 - protein, 164 aa, Homo sapiens
VKASAETPRPQPVDKLEKILEKLLTRFPQCNKAQMTNILQQIKTARTTMAGLTMEELIQLVAARLAEHERVAASTQPLGRIRALFPAPLAQISTPMFLPSAQVSYPGRSSHAPATCKLCLMCQKLVQPSELHPMACTHVLHKECIKFWAQTNTNDTCPFCPTLK

SEQ ID NO: 1279 - protein, 469 aa, Homo sapiens
  SITE (15): Xaa equals any of the naturally occurring L-amino acids
  SITE (81): Xaa equals any of the naturally occurring L-amino acids
PVAVGRVRVTAEGRXMVLQTTKGLRLLFDGDAHLLMSIPSPFRGRLCGLCGNFNGNWSDDFVLPNGSAASSVETFGAAWRXPGSSKGCGEGCGPQGCPVCLAEETAPYESNEACGQLRNPQGPFATCQAVLSPSEYFRQCVYDLCAQKGDKAFLCRSLAAYTAACQAAGVAVKPWRTDSFCPLHCPAHSHYSICTRTCQGSCAALSGLTGCTTRCFEGCECDDRFLLSQGVCIPVQDCGCTHNGRYLPVNSSLLTSDCSERCSCSSSSGLTCQAAGCPPGRVCEVKAEARNCWATRGLCVLSVGANLTTFDGARGATTSPGVYELSSRCPGLQNTIPWYRVVAEVQICHGKTEAVGQVHIFFQDGMVTLTPNKGVWVNGLRVDLPAEKLASVSVSRTPDGSLLVRQKAGVQVWLGANGKVAVIVSNDHAGKLCGACGNFDGDQTNDWHDSQEKPAMEKWRAQDFSPCYG

SEQ ID NO: 1280 - protein, 223 aa, Homo sapiens
  SITE (216): Xaa equals any of the naturally occurring L-amino acids
  SITE (217): Xaa equals any of the naturally occurring L-amino acids
GPRALWPPPEVGWGCSPNPTLLPPLSHFPLLRWGTNNKELTLPAPNPPPAPPCPPRFWFHFSSVHKLPLDSCVVFCSMFHSSTSVIAAATSAKCSSSLPPVLPTIPSPKILFVGKRGWGMAGWVTDYPSPREGGALPLGCCSRVSKGARIDHKGCRGHLLPLFCWGGVAMICPSLGLPLWFPICSYLNKKNILFWKKKKKKKKKKKKKKKKKKKKXXGGAPPP

SEQ ID NO: 1281 - protein, 37 aa, Homo sapiens
  SITE (31): Xaa equals any of the naturally occurring L-amino acids
TQSKWRLEVQCGKEKQVFIESTNSTPFKNFXGTQPKG

SEQ ID NO: 1282 - protein, 458 aa, Homo sapiens
  SITE (249): Xaa equals any of the naturally occurring L-amino acids
GPQRLSPGAMLPAATASLLGPLLTACALLPFAQGQTPNYTRPVFLCGGDVKGESGYVASEGFPNLYPPNKECIWTITVPEGQTVSLSFRVFDLELHPACRYDALEVFAGSGTSGQRLGRFCGTFRPAPLVAPGNQVTLRMTTDEGTGGRGFLLWYSGRATSGTEHQFCGGRLEKAQGTLTTPNWPESDYPPGISCSWHIIAPPDQVIALTFEKFDLEPDTYCRYDSVSVFNGAVSDDSRRLGKFCGDAXPGSISSEGNELLVQFVSDLSVTADGFSASYKTLPRGTAKEGQGPGPKRGTEPKVKLPPKSQPPEKTEESPSAPDAPTCPKQCRRTGTLQSNFCASSLVVTATVKSMVREPGEGLAVTVSLIGAYKTGGLDLPSPPTGASLKFYVPCKQCPPMKKGVSYLLMGQVEENRGPVLPPESFVVLHRPNQDQILTNLSKRKCPSQPVRAAASQD

SEQ ID NO: 1283 - protein, 229 aa, Homo sapiens
  SITE (45): Xaa equals any of the naturally occurring L-amino acids
  SITE (154): Xaa equals any of the naturally occurring L-amino acids
  SITE (155): Xaa equals any of the naturally occurring L-amino acids
CRAPLGAGLSPAVRRQEPPFPLGVTRGWGRWPIQKRREGARPVPXSERSQEDGRGPAARSSGTLWRIRTRLSLCRDPEPPPPLCLLRVSLLCALRAGGRGSRWGEDGARLLLLPPARAAGNGEAEPSGGPSYAGRMLESSGCKALKEGVLEKRXXGCCSSGRKSVASSPRKGCCLSRPSSCNTSSSSNSSSSSSNNSPGRGRPSRPNPVAPLSPASSRRSSSRNCTSPT

SEQ ID NO: 1284 - protein, 390 aa, Homo sapiens
  SITE (52): Xaa equals any of the naturally occurring L-amino acids
TSVAAAAARGRAGCPLTAASAARFKMAACSHSFSAERLLTFIVFSARFDRLXPAALSGIFYQAEMHRTTRIKITELNPHLMCVLCGGYFIDATTIIECLHSFCKTCIVRYLETSKYCPICDVQVHKTRPLLNIRSDKTLQDIVYKLVPGLFKNEMKRRRDFYAAHPSADAANGSNEDRGEVADEDKRIITDDEIISLSIEFFDQNRLDRKVNKDKEKSKEEVNDKRYLRCPAAMTVMHLRKFLRSKMDIPNTFQIDVMYEEEPLKDYYTLMDIAYIYTWRRNGPLPLKYRVRPTCKRMKISHQRDGLTNAGELESDSGSDKANSPAGGIPSTSSCLPSPSTPVQSPHPQFPHISSTMNGTSNSPSGNHQSSFANRPRKSSVNGSSATSSG

SEQ ID NO: 1285 - protein, 39 aa, Homo sapiens
HASAGSQLFEMHEKLSCMANSVIKNLQSRWRSPSHENSI

SEQ ID NO: 1286 - protein, 453 aa, Homo sapiens
  SITE (38): Xaa equals any of the naturally occurring L-amino acids
  SITE (101): Xaa equals any of the naturally occurring L-amino acids
  SITE (110): Xaa equals any of the naturally occurring L-amino acids
  SITE (286): Xaa equals any of the naturally occurring L-amino acids
RRSVICDSNATALELPGLPLSLPQPSIPAAVPQSAPPXPHREETVTATATSQVAQQPPAAAAPGEQAVAGPAPRLSPAVPAKTAQCPSLALWGAKRSRRRXKVAAAAQAXKEPQEERSQQQDDIEELETKAVGMSNDGRFLKFDIEIGRGSFKTVYKGLDTETTVEVAWCELQDRKLTKSERQRFKEEAEMLKGLQHPNIVRFYDSWESTVKGKKCIVLVTELMTSGTLKTYLKRFKVMKIKVLRSWCRQILKGLQFLHTRTPPIIHRDLKCDNIFITGPTGSVKXGDLGLATLKRASFAKSVIGTPEFMAPEMYEEKYDESVDVYAFGMCMLEMATSEYPYSECQNAAQIYRRVTSGVKPASFDKVAIPEVKEIIEGCIRQNKDERYSIKDLLNHAFFQEETGVRVELAEEDDGEKIAIKLWLRIEDIKKLKGKYKDKKKKKKKKKKNTHRA

SEQ ID NO: 1287 - protein, 450 aa, Homo sapiens
  SITE (33): Xaa equals any of the naturally occurring L-amino acids
  SITE (41): Xaa equals any of the naturally occurring L-amino acids
  SITE (43): Xaa equals any of the naturally occurring L-amino acids
  SITE (116): Xaa equals any of the naturally occurring L-amino acids
  SITE (193): Xaa equals any of the naturally occurring L-amino acids
  SITE (314): Xaa equals any of the naturally occurring L-amino acids
  SITE (326): Xaa equals any of the naturally occurring L-amino acids
  SITE (344): Xaa equals any of the naturally occurring L-amino acids
AAEVLCPSCFPISPAPWMTVGPASALFPCQTPXFPWTEWNXWXFTAHVLSQKFEKELSKVREYVQLISVYEKKLLNLTVRIDIMEKDTISYTELDFELIKVEVKEMEKLVIQLKEXFGGSSEIVDQLEVEIRNMTLLVEKLETLDKNNVLAIRREIVALKTKLKECEASKDQNTPVVHPPPTPGSCGHGGVVXISKPSVVQLNWRGFSYLYGAWGRDYSPQHPNKGLYWVAPLNTDGRLLEYYRLYNTLDDLLLYINARELRITYGQGSGTAVYNNNMYVNMYNTGNIARVNLTTNTIAVTQTLPNAAYNNRFXYANVAWQDIDFXVDENGLWVIYSTEASTGXMVISKLNDTTLQVLNTWYTKQYKPSASNAFMVCGVLYATRTMNTRTEEIFYYYDTNTGKEGKLDIVMHKMQEKVQSINYNPFDQKLYVYNDGYLLNYDLSVLQKPQ

SEQ ID NO: 1288 - protein, 164 aa, Homo sapiens
LQQALPNNGLLFTWTLSKEGGREGQSGVSFQHSSQKGERFSGWCHAIGIKQEAHGWLLNEEQNLGALWLTTAICGAGTHTSRQLQFCTFSLLDSKSRCCLAALRGHSLLRRALQSPAPGLGEWMRLLPYDTCQDALPPPLKVGPGQHCSLLSAFSGLRSQYELP

SEQ ID NO: 1289 - protein, 40 aa, Homo sapiens
  SITE (6): Xaa equals any of the naturally occurring L-amino acids
  SITE (30): Xaa equals any of the naturally occurring L-amino acids
WMSEYXQWVFLISLRICLRVHYQGISGTRXHSLHQFLRVL

SEQ ID NO: 1290 - protein, 266 aa, Homo sapiens
DIMESGFTSKDTYLSHFNPRDYLEKYYKFGSRHSAESQILKHLLKNLFKIFCLDGVKGDLLIDIGSGPTIYQLLSACESFKEIVVTDYSDQNLQELEKWLKKEPEAFDWSPVVTYVCDLEGNRVKGPEKEEKLRQAVKQVLKCDVTQSQPLGAVPLPPADCVLSTLCLDAACPDLPTYCRALRNLGSLLKPGGFLVIMDALKSSYYMIGEQKFSSLPLGREAVEAAVKEAGYTIEWFEVISQSYSSTMANNEGLFSLVARKLSRPL

SEQ ID NO: 1291 - protein, 112 aa, Homo sapiens
  SITE (55): Xaa equals any of the naturally occurring L-amino acids
CGSTILQGPQKALRRGLGEVGDQGKSRQRASKRLFASKALRGHLRPVRGQQPGRXGSDENEESSVVDYVEVTVGEEDAISDRSDSWSQAAAEGVSELAESDSDCVPAEAGQA

SEQ ID NO: 1292 - protein, 217 aa, Homo sapiens
GSTHASGTMRAAAISTPKLDKMPGMFFSANPKELKGTTHSLLDDKMQKRRPKTFGMDMKAYLRSMIPHLESGMKSSKSKDVLSAAEVMQWSQSLEKLLANQTGQNVFGSFLKSEFSEENIEFWLACEDYKKTESDLLPCKAEEIYKAFVHSDAAKQINIDFRTRESTAKKIKAPTPTCFDEAQKVIYTLMEKDSYPRFLKSDIYLNLLNDLQANSLK

SEQ ID NO: 1293 - protein, 235 aa, Homo sapiens
  SITE (229): Xaa equals any of the naturally occurring L-amino acids
LHLLAVLEKMISQGNNNKNGKNETGNNNNKDGSNHKAESGALIEAAKSKIHQYKVRAYIQMKSLKACKREIKSVMNTAGNSAPSLFLKSNFEYLRGNYRKAVKLLNSSNIAEHPGFMKTGECLRCMFWNNLGCIHFAMSKHNLGIFYFKKALQENDNVCAQLSAGSTDPGKKFSGRPMCTLLTNKRYELLYNCGIQLLHIGRPLAAFECLIEAVQVYHANPRLWLRLAXMLHCCQ

SEQ ID NO: 1294 - protein, 275 aa, Homo sapiens
  SITE (23): Xaa equals any of the naturally occurring L-amino acids
  SITE (49): Xaa equals any of the naturally occurring L-amino acids
  SITE (50): Xaa equals any of the naturally occurring L-amino acids
ARGARGRALPASGKAGRARGSAXGSAARGHWSLARFPAPRGSHLPARRXXGRVSTPILRPVSSIPLALSRESRTAEESSLTPQPQVGLVHIMTSFEDADTEETVTCLQMTVYHPGQLQCGIFQSISFNREKLPSSEVVKFGRNSNICHYTFQDKQVSRVQFSLQLFKKFNSSVLSFEIKNMSKKTNLIVDSRELGYLNKMDLPYRCMVRFGEYQFLMEKEDGESLEFFETQFILSPRSLLQENNWPPHRPIPEYGTYSLCSSQSSSPTEMDENES

SEQ ID NO: 1295 - protein, 677 aa, Homo sapiens
  SITE (144): Xaa equals any of the naturally occurring L-amino acids
  SITE (161): Xaa equals any of the naturally occurring L-amino acids
MTRLPKLWARPAGKALVSPVVQNITSPDEDGISPLGWLLDQYLECQEAVFNPQSRGPAFFSRVRRLTHLLVHVEPCEAPPPVVATPRPKGRNRSHDWSSLATRGLPSSIMRNLTRCWRAVVEKQVNNFLTSSWRDDDFVPRYCXHFNILQNSSSELFGPRXAFLLALQNGCAGALLKLPFLKAAHVSEQFARHIDQQIQGSRIGGAQEMERLAQLQQCLQAVLIFSGLEIATTFEHYYQHYMADRLLGVVSSWLEGAVLEQIGPCFPNRLPQQMLQSLSTSKELQRQFHVYQLQQLDQELLKLEDTEKKIQVGLGASGKEHKSEKEEEAGAAAVVDVAEGEEEEEENEDLYYEGAMPEVSVLVLSRHSWPVASICHTLNPRTCLPSYLRGTLNRYSNFYNKSQSHPALERGSQRRLQWTWLGWAELQFGNQTLHVSTVQMWLLLYLNDLKAVSVESLLAFSGLSADMLNQAIGPLTSSRGPLDLHEQKDIPGGVLKIRDGSKEPRSRWDIVRLIPPQTYLQAEGEDGQNLEKRRNLLNCLIVRILKAHGDEGLHIDQLVCLVLEAWQKGPCPPRGLVSSLGKGSACSSTDVLSCILHLLGKGTLRRHDDRPQVLSYAVPVTVMEPHTESLNPGSSGPNPPLTFHTLQIRSRGVPYASCTATQSFSTSGSPRLGVRGR

SEQ ID NO: 1296 - protein, 578 aa, Homo sapiens
GTREGARVGGARGGRDGRKMATATIALQVNGQQGGGSEPAAAAAVVAAGDKWKPPQGTDSIKMENGQSTAAKLGLPPLTPEQQEALQKAKKYAMEQSIKSVLVKQTIAHQQQQLTNLQMAAVTMGFGDPLSPLQSMAAQRQRALAIMCRVYVGSIYYELGEDTIRQAFAPFGPIKSIDMSWDSVTMKHKGFAFVEYEVPEAAQLALEQMNSVMLGGRNIKVGRPSNIGQAQPIIDQLAEEARAFNRIYVASVHQDLSDDDIKSVFEAFGKIKSCTLARDPTTGKHKGYGFIEYEKAQSSQDAVSSMNLFDLGGQYLRVGKAVTPPMPLLTPATPGGLPPAAAVAAAAATAKITAQEAVAGAAVLGTLGTPGLVSPALTLAQPLGTLPQAVMAAQAPGVITGVTPARPPIPVTIPSVGVVNPILASPPTLGLLEPKKEKEEEELFPESERPEMLSEQEHMSISGSSARHMVMQKLLRKQESTVMVLRNMVDPKDIDDDLEGEVTEECGKFGAVNRVIIYQEKQGEEEDAEIIVKIFVEFSIASETHKAIQALNGRWFAGRKVVAEVYDQERFDNSDLSA

SEQ ID NO: 1297 - protein, 179 aa, Homo sapiens [sequence omitted]

SEQ ID NO: 1298 - protein, 155 aa, Homo sapiens
GLVTIFGCPSREKGRMPLESSSSMPLSFPSLLPSVPHNTNPSPPLMSYITSQEMKCILHWFANWSGPQRERFLEDLVAKAVPEKLQPLLDSLEQLSVSGADRPPSIFECQLHLWDQWFRGWAEQERNEFVRQLEFSEPDFVAKFYQAVAATAGKD

SEQ ID NO: 1299 - protein, 449 aa, Homo sapiens
SNRKFIPHQLLVAIDLLARQAVRYINENLIVNTDELGRDCLINAAKTSMSSKIIGINGDFFANMVVDAVLAIKYTDIRGQPRYPVNSVNILKAHGRSQMESMLISGYALNCVVGSQGMPKRIVNAKIACLDFSLQKTKMKLGVQVVITDPEKLDQIRQRESDITKERIQKILATGANVILTTGGIDDMCLKYFVEAGAMAVRRVLKRDLKRIAKASGATILSTLANLEGEETFEAAMLGQAEEVVQERICDDELILIKNTKARTSASIILRGANDFMCDEMERSLHDALCVVKRVLESKSVVPGGGAVEAALSIYLENYATSMGSREQLAIAEFARSLLVIPNTLAVNAAQDSTDLVAKLRAFHNEAQVNPERKNLKWIGLDLSNGKPRDNKQAGVFEPTIVKVKSLKFATEAAITILRIDDLIKLHPESKDDKHGSYEDAVHSGALND

SEQ ID NO: 1300 - protein, 96 aa, Homo sapiens
LMFYVLFWTLSSCKNFYKNCFLHPCGAYSSEPSPQSQCLCFLFYFCSIRFLLLLCLKSSLGSYQGFSFCVAFAAWIKHWLTVLMCEEKKFSKAGEL

SEQ ID NO: 1301 - protein, 332 aa, Homo sapiens
GEPKMTGSNEFKLNQPPEDGISSVKFSPNTSQFLLVSSWDTSVRLYDVPANSMRLKYQHTGAVLDCAFYDPTHAWSGGLDHQLKMHDLNTDQENLVGTHDAPIRCVEYCPEVNVMVTGSWDQTVKLWDPRTPCNAGTFSQPEKVYTLSVSGDRLIVGTAGRRVLVWDLRNMGYVQQRRESSLKYQTRCIRAFPNKQGYVLSSIEGRVAVEYLDPSPEVQKKKYAFKCHRLKENNIEQIYPVNAISFHNIHNTFATGGSDGFVNIWDPFNKKRLCQFHRYPTSIASLAFSNDGTTLAIASSYMYEMDDTEHPEDGIFIRQVTDAETKPKSPCT

SEQ ID NO: 1302 - protein, 565 aa, Homo sapiens
LHCTMCGIWALFGSDDCLSVQCLSAMKIAHRGPDAFRFENVNGYTNCCFGFHRLAVVDPLFGMQPIRVKKYPYLWLCYNGEIYNHKKMQQHFEFEYQTKVDGEIILHLYDKGGIEQTICMLDGVFAFVLLDTANKKVFLGRDTYGVRPLFKAMTEDGFLAVCSEAKGLVTLKHSATPFLKVEPFLPGHYEVLDLKPNGKVASVEMVKYHHCRDEPLHALYDNVEKLFPGFEIETVKNNLRILFNNAVKKRLMTDRRIGCLLSGGLDSSLVAATLLKQLKEAQVQYPLQTFAIGMEDSPDLLAARKVADHIGSEHYEVLFNSEEGIQALDEVIFSLETYDITTVRASVGMYLISKYIRKNTDSVVIFSGEGSDELTQGYIYFHKAPSPEKAEEESERLLRELYLFDVLRADRTTAAHGLELRVPFLDHRFSSYYLSLPPEMRIPKNGIEKHLLRETFEDSNLIPKEILWRPKEAFSDGITSVKNSWFKILQEYVEHQVDDAMMANAAQKFPFNTPKTKEGYYYRQVFERHYPGRADWLSHYWMPKWINATDPSARTLTHYKSAVKA

SEQ ID NO: 1303 - protein, 441 aa, Homo sapiens
RRRRACRSAEGTGLRSLLLPPRLQLPAGPFSRCRWDPVSSPRPSTMPPKKGGDGIKPPPIIGRFGTSLKIGIVGLPNVGKSTFFNVLTNSQASAENFPFCTIDPNESRVPVPDERFDFLCQYHKPASKIPAFLNVVDIAGLVKGAHNGQGLGNAFLSHISACDGIFHLTRAFEDDDITHVEGSVDPIRDIEIIHEELQLKDEEMIGPIIDKLEKVAVRGGDKKLKPEYDIMCKVKSWVIDQKKPVRFYHDWNDKEIEVLNKHLFLTSKPMVYLVNLSEKDYIRKKNKWLIKIKEWVDKYDPGALVIPFSGALELKLQELSAEERQKYLEANMTQSALPKIIKAGFAALQLEYFFTAGPDEVRAWTIRKGTKAPQAAGKIHTDFEKGFIMAEVMKYEDFKEEGSENAVKAAGKYRQQGRNYIVEDGDIIFFKFNTPQQPKKK

SEQ ID NO: 1304 - protein, 94 aa, Homo sapiens
EKKRGREDKPGTMATFPPATSAPQQPPGPEDEDSSLDESDLYSLAHSYLGGGGRKGRTKREAAANTNRPSPGGHERKLVTKLQNSERKKRGARR

SEQ ID NO: 1305 - protein, 82 aa, Homo sapiens
VILEMVIVFCLVTFATVPFKTMWKPQVCGQHRWNDILCFLRLPSTRHISLVLQMSAQVLVTSFSCCPGKSVCAGAGALALFR

SEQ ID NO: 1306 - protein, 231 aa, Homo sapiens
AREMAAQQRDCGGAAQLAGPAAEADPLGRFTCPVCLEVYEKPVQVPCGHVFCSACLQECLKPKKPVCGVCRSALAPGVRAVELERQIESTETSCHGCRKNFFLSKIRSHVATCSKYQNYIMEGVKATIKDASLQPRNVPNRYTFPCPYCPEKNFDQEGLVEHCKLFHSTDTKSVVCPICASMPWGDPNYRSANFREHIQRRHRFSYDTFVDYDVDEEDMMNQVLQRSIIDQ

SEQ ID NO: 1307 - protein, 170 aa, Homo sapiens
QKQRTFWKYYYDGKDYIEFNKEIPAWVPFDPAAQITKQKWEAEPVYVQRAKAYLEEECPATLRKYLKYSKNILDRQDPPSVVVTSHQAPGEKKKLKCLAYDFYPGKIDVHWTRAGEVQEPELRGDVLHNGNGTYQSWVVVAVPPQDTAPYSCHVQHSSLAQPLVVPWEAS

SEQ ID NO: 1308 - protein, 111 aa, Homo sapiens
  SITE (95): Xaa equals any of the naturally occurring L-amino acids
  SITE (104): Xaa equals any of the naturally occurring L-amino acids
CSCTVRARRRLNRGLRRKQHSLLKRLRKAKKEAPPMEKPEVVKTHLRDMIILPEMVGSMVGVYNGKTFNQVEIKPEMIGHYLGEFSITYKPVKHXRPGIGATHXSRFIPLK

SEQ ID NO: 1309 - protein, 121 aa, Homo sapiens
PVSPQERPPPYLAVPGHGEEYPVAGAHSSPPKARFLRVPSEHPYLTPSPESPEHWASPSPPSLSDWSESTPSPATATGAMATTTGALPAQPLPLSVPSSLAQAQTQLGPQPEVTPKRQVLA

SEQ ID NO: 1310 - protein, 206 aa, Homo sapiens
QCPGRAGAPQTRAPRARERGGAMATANGAVENGQPDRKPPALPRPIRNLEVKFTKIFINNEWHESKSGKKFATCNPSTREQICEVEEGDKPDVDKAVEAAQVAFQRGSPWRRLDALSRGRLLHQLADLVERDRATLAALETMDTGKPFLHAFFIDLEGCIRTLRYFAGWADKIQGKTIPTDDNVCASPGMSPLVSVGPSLHGTSPC

SEQ ID NO: 1311 - protein, 142 aa, Homo sapiens
SWETEKMQTAGALFISPALIRCCTRGLIRPVSASFLNSPVNSSKQPSYSNFPLQVARREFQTSVVSRDIDTAAKFIGAGAATVGVAGSGAGIGTVFGSLIIGYARNPSLKQQLFSYAILGFALSEAMGLFCLMVAFLILFAM

SEQ ID NO: 1312 - protein, 495 aa, Homo sapiens
  SITE (121): Xaa equals any of the naturally occurring L-amino acids
  SITE (392): Xaa equals any of the naturally occurring L-amino acids
  SITE (460): Xaa equals any of the naturally occurring L-amino acids
RRMEGQDEVSAREQHFHSQVRESTICFLLFAILYVVSYFIITRYKRKSDEQEDEDAIVNRISLFLSTFTLAVSAGAVLLLPFSIISNEILLSFPQNYYIQWLNGSLIHGLWNLASLFSNLXLFVLMPFAFFFLESEGFAGLKKGIRARILETLVMLLLLALLILGIVWVASALIDNDAASMESLYDLWEFYLPYLYSCISLMGCLLLLLCTPVGLSRMFTVMGQLLVKPTILEDLDEQIYIITLEEEALQRRLNGLSSSVEYNIMELEQELENVKTLKTKLDPWSSFSVLQSPVWHFAAQTPADIVSPDSHFMLSTQGMSWAQLVFLLPASRPGNSQDKRRKKASAWERNLVYPAVMVLLLIETSISVLLVACNILCLLVDETAMPKGTRGXGIGNASLSTFGFVGAALEIILIFYLMVSSVVGFYSLRFFGNFTPKKDDTTMTKIIGNCVSILVLSSAXPVMSRTLGLHKLHLPNTSRDSETAKPSVNGHQKAL

SEQ ID NO: 1313 - protein, 790 aa, Homo sapiens
GTRGTATERLKMIPFLPMFSLLLLLIVNPINANNHYDKILAHSRIRGRDQGPNVCALQQILGTKKKYFSTCKNWYKKSICGQKTTVLYECCPGYMRMEGMKGCPAVLPIDHVYGTLGIVGATTTQRYSDASKLREEIEGKGSFTYFAPSNEAWDNLDSDIRRGLESNVNVELLNALHSHMINKRMLTKDLKNGMIIPSMYNNLGLFINHYPNGVVTVNCARIIHGNQIATNGVVHVIDRVLTQIGTSIQDFIEAEDDLSSFRAAAITSDILEALGRDGHFTLFAPTNEAFEKLPRGVLERIMGDKVASEALMKYHILNTLQCSESIMGGAVFETLEGNTIEIGCDGDSITVNGIKMVNKKDIVTNNGVIHLIDQVLIPDSAKQVIELAGKQQTTFTDLVAQLGLASALRPDGEYTLLAPVNNAFSDDTLSMDQRLLKLILQNHILKVKVGLNELYNGQILETIGGKQLRVFVYRTAVCIENSCMEKGSKQGRNGAIHIFREIIKPAEKSLHEKLKQDKRFSTFLSLLEAADLKELLTQPGDWTLFVPTNDAFKGMTSEEKEILIRDKNALQNIILYHLTPGVFIGKGFEPGVTNILKTTQGSKIFLKEVNDTLLVNELKSKESDIMTTNGVIHVVDKLLYPADTPVGNDQLLEILNKLIKYIQIKFVRGSTFKEIPVTVYKPIIKKYTKIIDGVPVEITEKETREERIITGPEIKYTRISTGGGETEETLKKLLQEEVTKVTKFIEGGDGHLFEDEEIKRLLQGDTPVRKLQANKKVQGSRRRLREGRSQ

SEQ ID NO: 1314 - protein, 73 aa, Homo sapiens
  SITE (10): Xaa equals any of the naturally occurring L-amino acids
  SITE (20): Xaa equals any of the naturally occurring L-amino acids
  SITE (42): Xaa equals any of the naturally occurring L-amino acids
TSWAFDETGXNTAVFLLEIXWGIFFELMGTIRHNCLHKLGIXDFGITIYQNGDISPLVLRCKPKNIMTSFQAS

SEQ ID NO: 1315 - protein, 268 aa, Homo sapiens
PGRPTRPRTRGINKLIRIGRNECVVVIRVDKEKGYIDLSKRRVSPEEAIKCEDKFTKSKTVYSILRHVAEVLEYTKDEQLESLFQRTAWVFDDKYKRPGYGAYDAFKHAVSDPSILDSLDLNEDEREVLINNINRRLTPQAVKIRADIEVACYGYEGIDAVKEALRAGLNCSTENMPIKINLIAPPRYVMTTTTLERTEGLSVLSQAMAVIKEKIEEKRGVFNVQMEPKVVTDTDETELARQMERLERENAEVDGDDDAEEMEAKAED

SEQ ID NO: 1316 - protein, 315 aa, Homo sapiens
GQRAGMPHAQGGWSGPAADSAEPALPAGEPGGPTLMRLNSVQSSERPLFLVHPIEGSTTVFHSLASRLSIPTYGLQCTRAAPLDSIHSLAAYYIDCIRQVQPEGPYRVAGYSYGACVAFEMCSQLQAQQSPAPTHNSLFLFDGSPTYVLAYTQSYRAKLTPGCEAEAETEAICFFVQQFTDMEHNRVLEALLPLKGLEERVAAAVDLIIKSHQGLDRQELSFAARSFYYKLRAAEQYTPKAKYHGNVMLLRAKTGGAYGEDLGADYNLSQVCDGKVSVHVIEGDHRTLLEGSGLESIISIIHSSLAEPRVSVREG

SEQ ID NO: 1317 - protein, 191 aa, Homo sapiens
  SITE (3): Xaa equals any of the naturally occurring L-amino acids
  SITE (5): Xaa equals any of the naturally occurring L-amino acids
  SITE (10): Xaa equals any of the naturally occurring L-amino acids
  SITE (20): Xaa equals any of the naturally occurring L-amino acids
  SITE (25): Xaa equals any of the naturally occurring L-amino acids
  SITE (186): Xaa equals any of the naturally occurring L-amino acids
TTXVXDRLLXTSGSPGTDRXFGHEXEMAPNASCLCVHVRSEEWDLMTFDANPYDSVKKIKEHVRSKTKVPVQDQVLLLGSKILKPRRSLSSYGIDKEKTIHLTLKVVKPSDEELPLFLVESGDEAKRHLLQVRRSSSVAQVKAMIETKTGIIPETQIVTCNGKRLEDGKMMADYGIRKGNLLFLAXYCIGG

SEQ ID NO: 1318 - protein, 230 aa, Homo sapiens
RNLQETAIMAEKPKLHYFNARGRMESTRWLLAAAGVEFEEKFIKSAEDLDKLRNDGYLMFQQVPMVEIDGMKLVQTRAILNYIASKYNLYGKDIKERALIDMYIEGIADLGEMILLLPVCPPEEKDAKLALIKEKIKNRYFPAFEKVLKSHGQDYLVGNKLSRADIHLVELLYYVEELDSSLISSFPLLKALKTRISNLPTVKKFLQPGSPRKPPMDEKSLEEARKIFRF

SEQ ID NO: 1319 - protein, 279 aa, Homo sapiens
EGPAEGNMAAKVFESIGKFGLALAVAGGVVNSALYNVDAGHRAVIFDRFRGVQDIVVGEGTHFLIPWVQKPIIFDCRSRPRNVPVITGSKDLQNVNITLRILFRPVASQLPRIFTSIGEDYDERVLPSITTEILKSVVARFDAGELITQRELVSRQVSDDLTERAATFGLILDDVSLTHLTFGKEFTEAVEAKQVAQQEAERARFVVEKAEQQKKAAIISAEGDSKAAELIANSLATAGDGLIELRKLEAAEDIAYQLSRSRNITYLPAGQSVLLQLPQ

SEQ ID NO: 1320 - protein, 406 aa, Homo sapiens
VTACAAPAAWLPILVADIWSSYNMADIDNKEQSELDQDLDDVEEVEEEETGEETKLKARQLTVQMMQNPQILAALQERLDGLVETPTGYIESLPRVVKRRVNALKNLQVKCAQIEAKFYEEVHDLERKYAVLYQPLFDKRFEIINAIYEPTEEECEWKPDEEDEISEELKEKAKIEDEKKDEEKEDPKGIPEFWLTVFKNVDLLSDMVQEHDEPILKHLKDIKVKFSDAGQPMSFVLEFHFEPNEYFTNEVLTKTYRMRSEPDDSDPFSFDGPEIMGCTGCQIDWKKGKNVTLKTIKKKQKHKGRGTVRTVTKTVSNDSFFNFFAPPEVPESGDLDDDAEAILAADFEIGHFLRERIIPRSVLYFTGEAIEDDDDDYDEEGEEADEGYQLFEEVKSCSKLFQRWLQ

SEQ ID NO: 1321 - protein, 173 aa, Homo sapiens
  SITE (55): Xaa equals any of the naturally occurring L-amino acids
QSACSLLPEMPRILTRTPSSRMIVLRLMPVGGRRPIVTSFGGCSTAPRANFPLPXPALRQSRSKMAVVGVSSVSRLLGRSRPQLGRPMSSGAHGEEGSARMWKTLTFFVALPGVAVSMLNVYLKSHHGEHERPEFIAYPHLRIRTKPFPWGDGNHTLFHNPHVNPLPTGYEDE

SEQ ID NO: 1322 - protein, 209 aa, Homo sapiens
KTQAASVEAVKMLDEILLQLSASVPVDVMPGEFDPTNYTLPQQPLHPCMFPLATAYSTLQLVTNPYQATIDGVRFLGTSGQNVSDIFRYSSMEDHLEILEWTLRVRHISPTAPDTLGCYPFYKTDPFIFPECPHVYFCGNTPSFGSKIIRGPEDQTVLLVTVPDFSATQTACLVNLRSLACQPISFSGFGAEDDDLGGLGWAPDSKKWF

SEQ ID NO: 1323 - protein, 291 aa, Homo sapiens
  SITE (30): Xaa equals any of the naturally occurring L-amino acids
  SITE (57): Xaa equals any of the naturally occurring L-amino acids
NNVATTHEPASVPAPQGDLLSGAEPEGGNXARRPPGAREQPQSPPPARGGAGSLATXAPPSSGLSCPGCFRLRLWMLRLSERNMKVLLAAALIAGSVFFLLLPGPSAADEKKKGPKVTVKVYFDLRIGDEDVGRVIFGLFGKTVPKTVDNFVALATGEKGFGYKNSKFHRVIKDFMIQGGDFTRGDGTGGKSIYGERFPDENFKLKHYGPGWVSMANAGKDTNGSQFFITTVKTAWLDGKHVVFGKVLEGMEVVRKVESTKTDSRDKPLKDVIIADCGKIEVEKPFAIAKE

SEQ ID NO: 1324 - protein, 150 aa, Homo sapiens
ECLVRSKNITQIVGHSGCEAKSIQNRACLGQCFSYSVPNTFPQSTESLVHCDSCMPAQSMWEIVTLECPGHEEVPRVDKLVEKILHCSCQACGKEPSHEGLSVYVQGEDGPGSQPGTHPHPHPHPHPGGQTPEPEDPPGAPHTEEEGAED

SEQ ID NO: 1325 - protein, 56 aa, Homo sapiens
EINISRKGESRFYKMSQLSNIWGSDSFFVRTFETSKQPLFLKNSGFTLTHVSFTPF

SEQ ID NO: 1326 - protein, 486 aa, Homo sapiens
  SITE (34): Xaa equals any of the naturally occurring L-amino acids
  SITE (438): Xaa equals any of the naturally occurring L-amino acids
  SITE (447): Xaa equals any of the naturally occurring L-amino acids
RLPLGSRSPSEAAGAETAPSSLSAAMTPLVSRLXRLWAIMRKPRAAVGSGHRKQAASQEGRQKHAKNNSQAKPSACDGLARQPEEVVLQASVSSYHLFRDVAEVTAFRGSLLSWYDQEKRDLPWRRRAEDEMDLDRRAYAVWVSEVMLQQTQVATVINYYTGWMQKWPTLQDLASASLEEVNQLWAGLGYYSRGRRLQEGARKVVEELGGHMPRTAETLQQLLPGVGRYTAGAIASIAFGQATGVVDGNVARVLCRVRAIGADPSSTLVSQQLWGLAQQLVDPARPGDFNQAAMELGATVCTPQRPLCSQCPVESLCRARQRVEQEQLLASGSLSGSPDVEECAPNTGQCHLCLPPSEPWDQTLGVVNFPRKASRKPPREESSATCVLEQPGALGAQILLVQRPNSGLLAGLWEFPSVTWEPSEQLQRKALLQELQRXAGPLPATHXRHLGEVVHTFSHIKLTYQVYGLALEGQTPVTTVPPGARC

SEQ ID NO: 1327 - protein, 88 aa, Homo sapiens
KTLFTYSFHGYNTLADFLLALGAMILITFCKVTNVIHSTLCGSHLFRLMCFGERKKFLAEYYFELSRTLSHQRQFFSVQFPIPDNLLK

SEQ ID NO: 1328 - protein, 424 aa, Homo sapiens
IRVSFMNNQKQQKPTLSGQRFKTRKRDEKERFDPTQFQDCIIQGLTETGTDLEAVAKFLDASGAKLDYRRYAETLFDILVAGGMLAPGGTLADDMMRTDVCVFAAQEDLETMQAFAQVFNKLIRRYKYLEKGFEDEVKKLLLFLKGFSESERNKLAMLTGVLLANGTLNASILNSLYNENLVKEGVSAAFAVKLFKSWINEKDINAVAASLRKVSMDNRLMELFPANKQSVEHFTKYFTEAGLKELSEYVRNQQTIGARKELQKELQEQMSRGDPFKDIILYVKEEMKKNNIPEPVVIGIVWSSVMSTVEWNKKEELVAEQAIKHLKQYSPLLAAFTTQGQSELTLLLKIQEYCYDNIHFMKAFQKIVVLFYKAEVLSEEPILKWYKDAHVAKGKSVFLEQMKKFVEWLKNAEEESESEAEEGD

SEQ ID NO: 1329 - protein, 558 aa, Homo sapiens
WYCSVGLASTAGEQAAAVAAAFSLHPDYAMLGFVGRVAAAPASGALRRLTPSASLPPAQLLLRAAPTAVHPVRDYAAQTSPSPKAGAATGRIVAVIGAVVDVQFDEGLPPILNALEVQGRETRLVLEVAQHLGESTVRTIAMDGTEGLVRGQKVLDSGAPIKIPVGPETLGRIMNVIGEPIDERGPIKTKQFAPIHAEAPEFMEMSVEQEILVTGIKVVDLLAPYAKGGKIGLFGGAGVGKTVLIMELINNVAKAHGGYSVFAGVGERTREGNDLYHEMIESGVINLKDATSKVALVYGQMNEPPGARARVALTGLTVAEYFRDQEGQDVLLFIDNIFRFTQAGSEVSALLGRIPSAVGYQPTLATDMGTMQERITTTKKGSITSVQAIYVPADDLTDPAPATTFAHLDATTVLSRAIAELGIYPAVDPLDSTSRIMDPNIVGSEHYDVARGVQKILQDYKSLQDIIAILGMDELSEEDKLTVSRARKIQRFLSQPFQVAEVFTGHMGKLVPLKETIKGFQQILAGEYDHLPEQAFYMVGPIEEAVAKADKLAEEHSS

SEQ ID NO: 1330 - protein, 134 aa, Homo sapiens
TTPLSQIVARGLIARGVPGAIVNVSSQCSQRAVTNHSVYCSTKGALDMLTKVMALELGPHKIRVNAVNPTVVMTSMGQATWSDPHKAKTMLNRIPLGKFAEVEHVVNAILFLLSDRSGMTTGSTLPVEGGFWAC

SEQ ID NO: 1331 - protein, 188 aa, Homo sapiens
  SITE (135): Xaa equals any of the naturally occurring L-amino acids
  SITE (137): Xaa equals any of the naturally occurring L-amino acids
IRHEPSRCRSRTAAVCSPPPCPPWRRPRGPWTAKSPPWPPARPRWQWTRALNSTAAPPRSPPAPCPCRPNSARRKRRPPANCRASSGWLAAWKPSRTGPAARPRRPVPDTSFHSSPVQAAVHFVGYKINHGPAMXLXFLLQLRLGRGPGLPRENVLETAPVFLAWFICPGSGSDSGGSETSVALSYWG

SEQ ID NO: 1332 - protein, 237 aa, Homo sapiens
  SITE (5): Xaa equals any of the naturally occurring L-amino acids
DDRRXDAEADKMAAAAVQGGRSGGSGGCSGAGGASNCGTGSGRSGLLDKWKIDDKPVKIDKWDGSAVKNSLDDSAKKVLLEKYKYVENFGLIDGRLTICTISCFFAIVALIWDYMHPFPESKPVLALCVISYFVMMGILTIYTSYKEKSIFLVAHRKDPTGMDPDDIWQLSSSLKRFDDKYTLKLTFISGRTKQQREAEFTKSIAKFFDHSGTLVMDAYEPEISRLHDSLAIERKIK

SEQ ID NO: 1333 - protein, 56 aa, Homo sapiens
TTANPLKTRGLALVAQPKVALQIFERATATFLPSQLSLDFSESGYCYPNVCLYECI

SEQ ID NO: 1334 - protein, 207 aa, Homo sapiens
SHPACAKVEYAYSDNSLDPDDEDSDYHQEAYKESYKDRRRRAHTQAEQKRRDAIKRGYDDLQTIVPTCQQQDFSIGSQKLSKAIVLQKTIDYIQFLHKEKKKQEEEVSTLRKDVTALKIMKVNYEQIVKAHQDNPHEGEDQVSDQVKFNVFQGIMDSLFQSFNASISVASFQELSACVFSWIEEHCKPQTLREIVIGVLHQLKNQLY

SEQ ID NO: 1335 - protein, 1005 aa, Homo sapiens
RVLQYVVPEVKDLYNWLEVEFNPLKLCERVTKVLNWVREQPEKEPELQQYVPQLQNNTILRLLQQVSQIYQSIEFSRLTSLVPFVDAFQLERAIVDAARHCDLQVRIDHTSRTLSFGSDLNYATREDAPIGPHLQSMPSEQIRNQLTAMSSVLAKALEVIKPAHILQEKEEQHQLAVTAYLKNSRKEHQRILARRQTIEERKERLESLNIQREKEELEQREAELQKVRKAEEERLRQEAKEREKERILQEHEQIKKKTVRERLEQIKKTELGAKAFKDIDIEDLEELDPDFIMAKQVEQLEKEKKELQERLKNQEKKIDYFERAKRLEEIPLIKSAYEEQRIKDMDLWEQQEEERITTMQLEREKALEHKNRMSRMLEDRDLFVMRLKAARQSVYEEKLKQFEERLAEERHNRLEERKRQRKEERRITYYREKEEEEQRRAEEQMLKEREERERAERAKREEELREYQERVKKLEEVERKKRQRELEIEERERRREEERRLGDSSLSRKDSRWGDRDSEGTWRKGPEADSEWRRGPPEKEWRRGEGRDEDRSHRRDEERPRRLGDDEDREPSLRPDDDRVPRRGMDDDRGPRRGPEEDRFSRRGADDDRPSWRNTDDDRPPRRIADEDRGNWRHADDDRPPRRGLDEDRGSWRTADEDRGPRRGMDDDRGPRRGGADDERSSWRNADDDRGPRRGLDDDRGPRRGMDDDRGPRRGMDDDRGPRRGMDDDRGPRRGLDDDRGPWRNADDDRIPRRGAEDDRGPWRNMDDDRLSRRADDDRFPRRGDDSRPGPWRPLVKPGGWREKEKAREESWGPPRESRPSEEREWDREKERDRDNQDREENDKDPERERDRERDVDREDRFRRPRDEGGWRRGPAEESSSWRDSSRRDDRDRDDRRRERDDRRDLRERRDLRDDRDRRGPPLRSEREEVSSWRRADDRKDDRVEERDPPRRVPPPALSRDRERDRDREREGEKEKASWRAEKDRESLRRTKNETDEDGWTTVRR

SEQ ID NO: 1336 - protein, 231 aa, Homo sapiens
  SITE (52): Xaa equals any of the naturally occurring L-amino acids
  SITE (64): Xaa equals any of the naturally occurring L-amino acids
  SITE (73): Xaa equals any of the naturally occurring L-amino acids
  SITE (79): Xaa equals any of the naturally occurring L-amino acids
  SITE (82): Xaa equals any of the naturally occurring L-amino acids
  SITE (83): Xaa equals any of the naturally occurring L-amino acids
  SITE (118): Xaa equals any of the naturally occurring L-amino acids
AGIHPMNSISSLDRTRMMTPFMGISPLPGGERFPYPSFHWDPIRDPLRDPYXELDIHRRDPLGXDFLLRNDPXHRLSTXRLXXADRSFRDREPHDYSHHHHHHHHPLSVDPRREHERXGHLDERERLHMLREDYEHTRLHSVHPASLDGHLPHPSLITPGLPSMHYPRISPTAGNQNGLLNKTPPTAALSAPPPLISTLGGRPVSPRRTTPLSAEIRERPPSHTLKDIEAR

SEQ ID NO: 1337 - protein, 155 aa, Homo sapiens
GVEGLKDAQMRDLLSPPTDNRPGQMDNRSKLRNIVELRLAGLDITDASLRLIIRHMPLLSKLHLSYCNHVTDQSINLLTAVGTTTRDSLTEINLSDCNKVTDQCLSFFKRCGNICHIDLRYCKQVTKEGCEQFIAEMSVSVQFGQVEEKLLQKLS

SEQ ID NO: 1338 - protein, 328 aa, Homo sapiens
NNSGVMPEMPEDMEQEEVNIPNRRVLVTGATGLLGRAVHKEFQQNNWHAVGCGFRRARPKFEQVNLLDSNAVHHIIHDFQPHVIVHCAAERRPDVVENQPDAASQLNVDASGNLAKEAAAVGAFLIYISSDYVFDGTNPPYREEDIPAPLNLYGKTKLDGEKAVLENNLGAAVLRIPILYGEVEKLEESAVTVMFDKVQFSNKSANMDHWQQRFPTHVKDVATVCRQLAEKRMLDPSIKGTFHWSGNEQMTKYEMACAIADAFNLPSSHLRPITDSPVLGAQRPRNAQLDCSKLETLGIGQRTPFRIGIKESLWPFLIDKRWRQTVFH

SEQ ID NO: 1339 - protein, 64 aa, Homo sapiens
  SITE (2): Xaa equals any of the naturally occurring L-amino acids
LXHPFAVTSYGKNLYFTDWKMNSVVALDLAISKETDAFQPHKQTRLYGITTALSQCPQAITTAQ

SEQ ID NO: 1340 - protein, 155 aa, Homo sapiens
RKMAVESRVTQEEIKKEPEKPIDREKTCPLLLRVFTTNNGRHHRMDEFSRGNVPSSELQIYTWMDATLKELTSLVKEVYPEARKKGTHFNFAIVFTDVKRPGYRVKEIGSTMSGRKGTDDSMTLQSQKFQIGDYLDIAITPPNRAPPPSGRMRPY

SEQ ID NO: 1341 - protein, 72 aa, Homo sapiens
AQLPSSSFLRHRGVFLTPLLAMSSHKTFRIKRFLAKKQKQNRPIPQWIRMKTGNKIRYNSKRRHWRRTKLGL

SEQ ID NO: 1342 - protein, 270 aa, Homo sapiens
LKVAQTDGVNVDMHLKQIEIKKFKYGIEEHGKVKMRGGLLRTYIISILFKSIFEVAFLLIQWYIYGFSLSAVYTCKRDPCPHQVDCFLSRPTEKTIFIIFMLVVSLVSLALNIIELFYVFFKGVKDRVKGKSDPYHATSGALSPAKDCGSQKYAYFNGCSSPTAPLSPMSPPGYKLVTGDRNNSSCRNYNKQASEQNWANYSAEQNRMGQAGSTISNSHAQPFDFPDDNQNSKKLAAGHELQPLAIVDQRPSSRASSRASSRPRPDDLEI

SEQ ID NO: 1343 - protein, 94 aa, Homo sapiens
  SITE (55): Xaa equals any of the naturally occurring L-amino acids
QELRSPSRSPSPPPKSPPWTTGGSLCEQLAFRKPLSVFKQKVEGATKQAAVRASXCRPLPCSSSSFASASSVMFCLEFYLDFFSGYFSVFQPLL

SEQ ID NO: 1344 - protein, 125 aa, Homo sapiens
  SITE (118): Xaa equals any of the naturally occurring L-amino acids
  SITE (122): Xaa equals any of the naturally occurring L-amino acids
  SITE (123): Xaa equals any of the naturally occurring L-amino acids
YSTRALWKPNHVHVCVCVCASFEPPSTAASSHDTKLLISTFLWVAQGLIASHSITRIEARHGGACLVVPAKLGRLEGREGSLWSPGRLEGWQWSHGSGGHWHFQPGGGRVETFVLQKXKKKXXGG

SEQ ID NO: 1345 - protein, 131 aa, Homo sapiens
PRVRRLREDDRRGFLSFRADSAHASMVNVPKTRRTFCKKCGKHQPHKVTQYKKGKDSLYAQGKRRYDRKQSGYGGQTKPIFRKKAKTTKKIVLRLECVEPNCRSKRMLAIKRCKHFELGGDKKRKGQVIQF

SEQ ID NO: 1346 - protein, 75 aa, Homo sapiens
NKRNCKFPLLKITKITETKEEIRIWGIVLNNLVVKKNNCACLDLNKPPSKCEGSSNFSKHMKVLIHFDKGPLKKS

SEQ ID NO: 1347 - protein, 413 aa, Homo sapiens
GVARAQPVPAVLSWLLALLRCAATMLSLRVPLAPITDPQQLQLSPLKGLSLVDKENTPPALSGTRVLASKTARRIFQEPTEPKTKAAAPGVEDEPLLRENPRRFVIFPIEYHDIWQMYKKAEASFWTAEEVDLSKDIQHWESLKPEERYFISHVLAFFAASDGIVNENLVERFSQEVQITEARCFYGFQIAMENIHSEMYSLLIDTYIKDPKEREFLFNAIETMPCVKKKADWALRWIGDKEATYGERVVAFAAVEGIFFSGSFASIFWLKKRGLMPGLTFSNELISRDEGLHCDFACLMFKHLVHKPSEERVREIIINAVRIEQEFLTEALPVKLIGMNCTLMKQYIEFVADRLMLELGFSKVFRVENPFDFMENISLEGKTNFFEKRVGEYQRMGVMSSPTENSFTLDADF

SEQ ID NO: 1348 - protein, 243 aa, Homo sapiens
TGNKMQDPNADTEWNDILRKKGILPPKESLKELEEEAEEEQRILQQSVVKTYEDMTLEELEDHEDEFNEEDERAIEMYRRRRLAEWKATKLKNKFGEVLEISGKDYVQEVTKAGEGLWVILHLYKQGIPLCALINQHLSGLARKFPDVKFIKAISTTCIPNYPDRNLPTIFVYLEGDIKAQFIGPLVFGGMNLTRDELEWKLSESGAIMTDLEENPKKPIEDVLLSSVRRSVLMKRDSDSEGD

SEQ ID NO: 1349 - protein, 326 aa, Homo sapiens
  SITE (137): Xaa equals any of the naturally occurring L-amino acids
  SITE (142): Xaa equals any of the naturally occurring L-amino acids
RMATPLPPPSPRHLRLLRLLLSGLVLGAALRGAAAGHPDVAACPGSLDCALKRRARCPPGAHACGPCLQPFQEDQQGLCVPRMRRPPGGGRPQPRLEDEIDFLAQELARKESGHSTPPLPKDRQRLPEPATLGFSAXGQGLXLGLPSTPGTPTPTPHTSLGSPVSSDPVHMSPLEPRGGQGDGLALVLILAFCVAGAAALSVASLCWCRLQREIRLTQKADYATAKAPGSPAAPRISPGDQRLAQSAEMYHYQHQRQQMLCLERHKEPPKELDTASSDEENEDGDFTVYECPGLAPTGEMEVRNPLFDHAALSAPLPAPSSPPALP

SEQ ID NO: 1350 - protein, 62 aa, Homo sapiens
VKSDTPPCVSKNLVPPLHTSLTLNIFHWILDRAKGRTGASGGPWLFKSWIICDSNHKFLANF

SEQ ID NO: 1351 - protein, 312 aa, Homo sapiens
  SITE (299): Xaa equals any of the naturally occurring L-amino acids
EPRPGCGNKMAGKKNVLSSLAVYAEDSEPESDGEAGIEAVGSAAEEKGGLVSDAYGEDDFSRLGGDEDGYEEEEDENSRQSEDDDSETEKPEADDPKDNTEAEKRDPQELVASFSERVRNMSPDEIKIPPEPPGRCSNHLQDKIQKLYERKIKEGMDMNYIIQRKKEFRNPSIYEKLIQFCAIDELGTNYPKDMFDPHGWSEDSYYEALAKAQKIEMDKLEKAKKERTKIEFVTGTKKGTTTNATSTTTTTASTAVADAQKRKSKWDSAIPVTTISPAHHPHHHSHPASCCHGHHQRQXSKDHRHLCCGAPL

SEQ ID NO: 1352 - protein, 259 aa, Homo sapiens
  SITE (7): Xaa equals any of the naturally occurring L-amino acids
LLDSLKXDYAGKPQPPIKSERRNPPSYAMAGKKVLIVYAHQEPKSFNGSLKNVAVDELSRQGCTVTVSDLYAMNFEPRATDKDITGTLSNPEVFNYGVETHEAYKQRSLASDITDEQKKVREADLVIFQFPLYWFSVPAILKGWMDRVLCQGFAFDIPGFYDSGLLQGKLALLSVTTGGTAEMYTKTGVNGDSRYFLWPLQHGTLHFCGFKVLAPQISFAPEIASEEERKGMVAAWSQRLQTIWKEEPIPCTAHWHFGQ

SEQ ID NO: 1353 - protein, 72 aa, Homo sapiens
DLASEEHFFSVKFLYLKIQKYFRILLILSPVFTSFWKTCITMSLEKGQRKAFHVKIRSLAISNPVLFSLHFF

SEQ ID NO: 1354 - protein, 301 aa, Homo sapiens
KRRRRLEQRQQPDEQRRRSGAMVKMAAAGGGGGGGRYYGGGSEGGRAPKRLKTDNAGDQHGGGGGGGGGAGAAGGGGGGENYDDPHKTPASPVVHIRGLIDGVVEADLVEALQEFGPISYVVVMPKKRQALVEFEDVLGACNAVNYAADNQIYIAGHPAFVNYSTSQKISRPGDSDDSRSVNSVLLFTILNPIYSITTDVLYTICNPCGPVQRIVIFRKNGVQAMVEFDSVQSAQRAKASLNGADIYSGCCTLKIEYAKPTRLNVFKNDQDTWDYTNPNLSGQGNLDDHFVLNIPALLSLD

SEQ ID NO: 1355 - protein, 466 aa, Homo sapiens
NTVMGRKKKKQLKPWCWYCNRDFDDEKILIQHQKAKHFKCHICHKKLYTGPGLAIHCMQVHKETIDAVPNAIPGRTDIELEIYGMEGIPEKDMDERRRLLEQKTQESQKKKQQDDSDEYDDDDSAASTSFQPQPVQPQQGYIPPMAQPGLPPVPGAPGMPPGIPPLMPGVPPLMPGMPPVMPGMPPGLHHQRKYTQSFCGENIMMPMGGMMPPGPGIPPLMPGMPPGMPPPVPRPGIPPMTQAQAVSAPGILNRPPAPTATVPAPQPPVTKPLFPSAGQAQAAVQGPVGTDFKPLNSTPATTTEPPKPTFPAYTQSTASTTSTTNSTAAKPAASITSKPATLTTTSATSKLIHPDEDISLEERRAQLPKYQRNLPRPGQAPIGNPPVGPIGGMMPPQPGIPQQQGMRPPMPPHGQYGGHHQGMPGYLPGAMPPYGQGPPMVPPYQGGPPRPPMGMRPPVMSQGGRY

SEQ ID NO: 1356 - protein, 85 aa, Homo sapiens
LSDDQSLLIILLLKGLLTNLSFTPCGPCYWYTQYVLTEDMDFICSSAGIGKLDLFSMIQNSPIRRLEKEELYSSLCYFLLPFLFL

SEQ ID NO: 1357 - protein, 580 aa, Homo sapiens
  SITE (3): Xaa equals any of the naturally occurring L-amino acids
  SITE (526): Xaa equals any of the naturally occurring L-amino acids
DSXTFDDLAVDFTPEEWTLLDPTQRNLYRDVMLENYKNLATVGYQLFKPSLISWLEQEESRTVQRGDFQASEWKVQLKTKELALQQDVLGEPTSSGIQMIGSHNGGEVSDVKQCGDVSSEHSCLKTHVRTQNSENTFECYLYGVDFLTLHKKTSTGEQRSVFSQCGKAFSLNPDVVCQRTCTGEKAFDCSDSGKSFINHSHLQGHLRTHNGESLHEWKECGRGFIHSTDLAVRIQTHRSEKPYKCKECGKGFRYSAYLNIHMGTHTGDNPYECKECGKAFTRSCQLTQHRKTHTGEKPYKCKDCGRAFTVSSCLSQHMKIHVGEKPYECKECGIAFTRSSQLTEHLKTHTAKDPFECKICGKSFRNSSCLSDHFRIHTGIKPYKCKDCGKAFTQNSDLTKHARTHSGERPYECKECGKAFARSSRLSEHTRTHTGEKPFECVKCGKAFAISSNLSGHLRIHTGEKPFECLECGKAFTHSSSLNNHMRTHSAKKPFTCMECGKAFKFPTCVNLHMRIHTGEKPYKCXQCGKSFSYSNSFQLHERTHTGEKPYECKECGKAFSSSSSFRNHERRHADERLSA

SEQ ID NO: 1358 - protein, 612 aa, Homo sapiens
  SITE (134): Xaa equals any of the naturally occurring L-amino acids
  SITE (445): Xaa equals any of the naturally occurring L-amino acids
EVPEAHRASPREGTSGGERLQDLVKSKMSETSRTAFGGRRAVPPNNSNAAEDDLPTVELQGVVPRGVNLQDDAVYLDNEKEREEYVLNDIGVIFYGEVNDIKTRSWSYGQFEDGILDTCLYVMDRAQMDLSGRXNPIKVSRVGSAMVNAKDDEGVLVGSWDNIYAYGVPPSAWTGSVDILLEYRSSENPVRYGQCWVFAGVFNTFLRCLGIPARIVTNYFSAHDNDANLQMDIFLEEDGNVNSKLTKDSVWNYHCWNEAWMTRPDLPVGFGGWQAVDSTPQENSDGMYRCGPASVQAIKHGHVCFQFDAPFVFAEVNSDLIYITAKKDGTHVVENVDATHIGKLIVTKQIGGDGMMDITDTYKFQEGQEEERLALETALMYGAKKPLNTEGVMKSRSNVDMDFEVENAVLGKDFKLSITFRNNSHNRYTITAYLSANITFYTGVXKAEFKKETFDVTLEPLSFKKEAVLIQAGEYMGQLLEQASLHFFVTARINETRDVLAKQKSTVLTIPEIIIKVRGTQVVGSDMTVTVEFTNPLKETLRNVWVHLDGPGVTRPMKKMFREIRPNSTVQWEEVCRPWVSGHRKLIASMSSDSLRHVYGELDVQIQRRPSM

SEQ ID NO: 1359 - protein, 56 aa, Homo sapiens
LSCIVLLRQSSVKLYQLRLVSSDFHWGIRVLAGLNLLLVGSVFLMNKSHSTELQVI

SEQ ID NO: 1360 - protein, 415 aa, Homo sapiens
  SITE (368): Xaa equals any of the naturally occurring L-amino acids
  SITE (374): Xaa equals any of the naturally occurring L-amino acids
  SITE (379): Xaa equals any of the naturally occurring L-amino acids
  SITE (381): Xaa equals any of the naturally occurring L-amino acids
  SITE (384): Xaa equals any of the naturally occurring L-amino acids
  SITE (385): Xaa equals any of the naturally occurring L-amino acids
  SITE (386): Xaa equals any of the naturally occurring L-amino acids
  SITE (389): Xaa equals any of the naturally occurring L-amino acids
  SITE (397): Xaa equals any of the naturally occurring L-amino acids
  SITE (404): Xaa equals any of the naturally occurring L-amino acids
  SITE (405): Xaa equals any of the naturally occurring L-amino acids
  SITE (409): Xaa equals any of the naturally occurring L-amino acids
GGGGEKMADDPSAADRNVEIWKIKKLIKSLEAARGNGTSMISLIIPPKDQISRVAKMLADEFGTASNIKSRVNRLSVLGAITSVQQRLKLYNKVPPNGLVVYCGTIVTEEGKEKKVNIDFEPFKPINTSLYLCDNKFHTEALTALLSDDSKFGFIVIDGSGALFGTLQGNTREVLHKFTVDLPKKHGRGGQSALRFARLRMEKRHNYVRKVAETAVQLFISGDKVNVAGLVLAGSADFKTELSQSDMFDQRLQSKVLKLVDISYGGENGFNQAIELSTEVLSNVKFIQEKKLIGRYFDEISQDTGKYCFGVEDTLKALEMGAVEILIVYENLDIMRYVLHCQGTEEEKILYLTPEQEKDKSHFTDKEXRTGTMXLSRAXPXLEXXXNNXKKLGLPWXIGPINSXXRGQXWKRIGG

SEQ ID NO: 1361 - protein, 119 aa, Homo sapiens
HASADAWADAWVAGSDFIKTSTGKETVNATFPVAIVMLRAIRDFFWKTGNKIGFKPAGGIRSAKDSLAWLSLVKEELGDEWLKPELFRIGASTLLSDIERQIYHHVTGRYAAYHDLPMS

SEQ ID NO: 1362 - protein, 282 aa, Homo sapiens
  SITE (34): Xaa equals any of the naturally occurring L-amino acids
  SITE (35): Xaa equals any of the naturally occurring L-amino acids
GRVGGRVGGRVGFTAKVWDAVSGDELMTLAHKHXXKTVDFTQDSNYLLTGGQDKLLRIYDLNKPEAEPKEISGHTSGIKKALWCSEDKQILSADDKTVRLWDHATMTEVKSLNFNMSVSSMEYIPEGEILVITYGRSIAFHSAVSLDPIKSFEAPATINSASLHPEKEFLVAGGEDFKLYKYDYNSGEELESYKGHFGPIHCVRFSPDGELYASGSEDGTLRLWQTVVGKTYGLWKCVLPEEDSGELAKPKIGFPETTEEELEEIASENSDCIFPSAPDVKA

SEQ ID NO: 1363 - protein, 334 aa, Homo sapiens
TPRTPEPHKPGLAMKPGFSPRGGGFGGRGGFGDRGGRGGRGGFGGGRGRGGGFRGRGRGGGGGGGGGGGGGRGGGGFHSGGNRGRGRGGKRGNQSGKNVMVEPHRHEGVFICRGKEDALVTKNLVPGESVYGEKRVSISEGDDKIEYRAWNPFRSKLAAAILGGVDQIHIKPGAKVLYLGAASGTTVSHVSDIVGPDGLVYAVEFSHRSGRDLINLAKKRTNIIPVIEDARHPHKYRMLIAMVDVIFADVAQPDQTRIVALNAHTFLRNGGHFVISIKANCIDSTASAEAVFASEVKKMQQENMKPQEQLTLEPYERDHAVVVGVYRPPPKVKN

SEQ ID NO: 1364 - protein, 602 aa, Homo sapiens
  SITE (356): Xaa equals any of the naturally occurring L-amino acids
PGAEKSGRAAERPGRGPGRGAHSRPTAPRERAPRSPAPSPPGMGRAAAAEAPAWPGRTRPEAEGRARAQLPGHQIGARRAGGPRAGLEMSWPRRLLLRYLFPALLLHGLGEGSALLHPDSRSHPRSLEKSAWRAFKESQCHHMLKHLHNGARITVQMPPTIEGHWVSTGCEVRSGPEFITRSYRFYHNNTFKAYQFYYGSNRCTNPTYTLIIRGKIRLRQASWIIRGGTEADYQLHNVQVICHTEAVAEKLGQQVNRTCPGFLADGGPWVQDVAYDLWREENGCECTKAVNFAMHELQLIRVEKQYLHHNLDHLVEELFLGDIHTDATQRMFYRPSSYQPPLQNAKNHDHACIACXIIYRSDEHHPPILPPKADLTIGLHGEWVSQRCEVRPEVLFLTRHFIFHDNNNTWEGHYYHYSDPVCKHPTFSIYARGRYSRGVLSSRVMGGTEFVFKVNHMKVTPMDAATASLLNVFNGNECGAEGSWQVGIQQDVTHTNGCVALGIKLPHTEYEIFKMEQDARGRYLLFNGQRPSDGSSPDRPEKRATSYQMPLVQCASSSPRAEDLAEDSGSSLYGRAPGRHTWSLLLAALACLVPLLHWNIRR

SEQ ID NO: 1365 - protein, 158 aa, Homo sapiens
  SITE (26): Xaa equals any of the naturally occurring L-amino acids
  SITE (40): Xaa equals any of the naturally occurring L-amino acids
  SITE (78): Xaa equals any of the naturally occurring L-amino acids
  SITE (98): Xaa equals any of the naturally occurring L-amino acids
  SITE (136): Xaa equals any of the naturally occurring L-amino acids
  SITE (141): Xaa equals any of the naturally occurring L-amino acids
  SITE (142): Xaa equals any of the naturally occurring L-amino acids
SNSGYPFWTPSMLWKLCTFTLLNKAXSFFSLSVHVSFTHXGQLPHHFFGVAWQEPQVLHLGEPDRRLQKRIKAIKLQXILQMEPQMSSAHGFYRGPLXQPAGPSITLENSPLEDTKLQGPFFTPNQQEVARTDCHXVPNSXXGCPVLEAGFRGGAQLG

SEQ ID NO: 1366 - protein, 466 aa, Homo sapiens
  SITE (4): Xaa equals any of the naturally occurring L-amino acids
  SITE (12): Xaa equals any of the naturally occurring L-amino acids
  SITE (205): Xaa equals any of the naturally occurring L-amino acids
  SITE (220): Xaa equals any of the naturally occurring L-amino acids
  SITE (347): Xaa equals any of the naturally occurring L-amino acids
STRXREGNSHSXGHKTIQGSLGRLSSAVPGSGAELSPVPNTDGTMNSGHSFSQTPSASFHGAGGGWGRPRSFPRAPTVHGGAGGARISLSFTTRSCPPPGGSWGSGRSSPLLGGNGKATMQNLNDRLASYLEKVRALEEANMKLESRILKWHQQRDPGSKKDYSQYEENITHLQEQIVDGKMTNAQIILLIDNARMAVDDFNLKXENEHSFKKDLEIEVXGLRRTLDNLTIVTTDLEQEVEGMRKELILMKKHHEQEMEKHHVPSDFNVNVKVDTGPREDLIKVLEDMRQEYELIIKKKHRDLDTWYKEQSAAMSQEAASPATVQSRQGDIHELKRTFQALEIDLQXQYSTKSALENMLSETQSRYSCKLQDMQEIISHYEEELTQLRHELERQNNEYQVLLGIKTHLEKEITTYRRLLEGESEGTREESKSSMKVSATPKIKAITQETINGRLVLCQVNEIQKHA

SEQ ID NO: 1367 - protein, 153 aa, Homo sapiens
  SITE (136): Xaa equals any of the naturally occurring L-amino acids
  SITE (138): Xaa equals any of the naturally occurring L-amino acids
  SITE (141): Xaa equals any of the naturally occurring L-amino acids
  SITE (142): Xaa equals any of the naturally occurring L-amino acids
  SITE (143): Xaa equals any of the naturally occurring L-amino acids
  SITE (152): Xaa equals any of the naturally occurring L-amino acids
LRFASPGPGAGRARDSQRKWRRLRARPLLGPGQGWSWAGIPSSAAAQRAGPPAGALEALSPGGARAHAERRGEMRATPLAAPAGSLSRKKRLELDDNLDTERPVQKRARSGPQPRLPPCLLPLSPPTAPDRATAVXTXSRXXXYVLLEARRXA

SEQ ID NO: 1368 - protein, 399 aa, Homo sapiens
  SITE (4): Xaa equals any of the naturally occurring L-amino acids
  SITE (13): Xaa equals any of the naturally occurring L-amino acids
SDNXTNGCGLESXGNTVTPVNVNEVKPINKGEEQIGFELVEKLFQGQLVLRTRCLECESLTERREDFQDISVPVQEDELSKVEESSEISPEPKTEMKTLRWAISQFASVERIVGEDKYFCENCHHYTEAERSLLFDKMPEVITIHLKCFAASGLEFDCYGGGLSKINTPLLTPLKLSLEEWSTKPTNDSYGLFAVVMHSGITISSGHYTASVKVTDLNSLELDKGNFVVDQMCEIGKPEPLNEEEARGVVENYNDEEVSIRVGGNTQPSKVLNKKNVEAIGLLGGQKSKADYELYNKASNPDKVASTAFAENRNSETSDTTGTHESDRNKESSDQTGINISGFENKISYVVQSLKEYEGKWLLFDDSEVKVTEEKDFLNSLSPSTSPTSTPYLLFYKKL

SEQ ID NO: 1369 - protein, 260 aa, Homo sapiens
  SITE (3): Xaa equals any of the naturally occurring L-amino acids
VFXSFFAEKEQQEAIEHIDEVQNEIDRLNEQASEEILKVEQKYNKLRQPFFQKRSELIAKIPNFWVTTFVNHPQVSALLGEEDEEALHYLTRVEVTEFEDIKSGYRIDFYFDENPYFENKVLSKEFHLNESGDPSSKSTEIKWKSGKDLTKRSSQTQNKASRKRQHEEPESFFTWFTDHSDAGADELGEVIKDDIWPNPLQYYLVPDMDDEEGEGEEDDDDDEEEEGLEDIDEEGDEDEGEEDEDDDEGEEGEEDEGEDD

SEQ ID NO: 1370 - protein, 155 aa, Homo sapiens
KGEAAAFSATFPIARQEFLSVTTIAVMSGRGKQGGKARAKAKSRSSRAGLQFPVGECIALRKGNYAERVGAGAPVYMAAVLEYLTAEILELAGNAARDNKKTRIIPRHLQLAIRNDEELNKLLGKVTIAQGGVLPNIQAVLLPKKTESHHKAKGK

SEQ ID NO: 1371 - protein, 140 aa, Homo sapiens
FPGRTHALCRGAASRGLLCKWAPWPSAPVPATRDRAPRPARGRRPDPTSQQAKAWRPSPPAARSWPPTTTTGAAWVPLPATAPAAVPSAPGKPFPTPQVSPRLTRVIGGPASFSGSPPSRSWPRCWSPQSTRNLPRPPAA

SEQ ID NO: 1372 - protein, 150 aa, Homo sapiens
  SITE (126): Xaa equals any of the naturally occurring L-amino acids
  SITE (127): Xaa equals any of the naturally occurring L-amino acids
  SITE (128): Xaa equals any of the naturally occurring L-amino acids
  SITE (135): Xaa equals any of the naturally occurring L-amino acids
  SITE (142): Xaa equals any of the naturally occurring L-amino acids
  SITE (147): Xaa equals any of the naturally occurring L-amino acids
PWTLGGPELDAMGGCAGSRRRFSDSEGEETVPEPRLPLLDHQGAHWKNAVGFWLLGLCNNFSYVVMLSAAHDILSHKRTSGNQSHVDPGPTPIPHNSSSRFDCNSVSTAAVLLADILPTLVIKLLXXXGLHLLPXTVEDAVXLCALXGTA

SEQ ID NO: 1373 - protein, 128 aa, Homo sapiens
  SITE (21): Xaa equals any of the naturally occurring L-amino acids
  SITE (121): Xaa equals any of the naturally occurring L-amino acids
RHSRVDPRVRARFRRRRAFAXLGWSSGRVSRPEHVDAHPPLSLMEVVTFGDVAVHFSREEWQCLDPGQRALYREVMLENHSSVAGLAGFLVFKPELISRLEQGEEPWVLDLQGAEGTEAPXTSKTGEA

SEQ ID NO: 1374 - protein, 398 aa, Homo sapiens
SSWLRSRSGMQTDLQNLGNDSGDHSDHMHYYQGKKYFRDRRGGGRNSDWSSDTNRQGQQSSSDCYIYDSATGYYYDPLAGTYYDPNTQQEVYVPQDPGLPEEEEIKEKKPTSQGKSSSKKEMSKRDGKEKKDRGVTRFQENASEGKAPAEDVFKKPLPPTVKKEESPPPPKVVNPLIGLLGEYGGDSDYEEEEEEEQTPPPQPRTAQPQKREEQTKKENEEDKLTDWNKLACLLCRRQFPNKEVLIKHQQLSDLHKQNLEIHRKIKQSEQELAYLERREREGKFKGRGNDRREKLQSFDSPERKRIKYSRETDSDRKLVDKEDIDTSSKGGCVQQATGWRKGTGLGYGHPGLASSEEAEGRMRGPSVGASGRTSKRQSNETYRDAVRRVMFARYKELD

SEQ ID NO: 1375 - protein, 167 aa, Homo sapiens
  SITE (157): Xaa equals any of the naturally occurring L-amino acids
  SITE (161): Xaa equals any of the naturally occurring L-amino acids
  SITE (163): Xaa equals any of the naturally occurring L-amino acids
HRGKRYTDSTVRNSRVDPRVRSAKPESCPFSLPGQHELHHSLHLLHQLPVPGLCPGAQLRRPAGQQRGQRLCRRWGLWFPDLRVPLHQLQGRHGVRGPGHRDSRGSGRNGSIQNEKETMQKLNDRLASYLDKMKEPGDRETGGWKAKTREHFGEEGXQVRXWXPLIQ

SEQ ID NO: 1376 - protein, 448 aa, Homo sapiens
LPDVEKLGRRRGRKMDSVEKGAATSVSNPRGRPSRGRPPKLQRNSRGGQGRGVEKPPHLAALILARGGSKGIPLKNIKHLAGVPLIGWVLRAALDSGAFQSVWVSTDHDEIENVAKQFGAQVHRRSSEVSKDSSTSLDAIIEFLNYHNEVDIVGNIQATSPCLHPTDLQKVAEMIREEGYDSVFSVVRRHQFRWSEIQKGVREVTEPLNLNPAKRPRRQDWDGELYENGSFYFAKRHLIEMGYLQGGKMAYYEMRAEHSVDIDVDIDWPIAEQRVLRYGYFGKEKLKEIKLLVCNIDGCLTNGHIYVSGDQKEIISYDVKDAIGISLLKKSGIEVRLISERACSKQTLSSLKLDCKMEVSVSDKLAVVDEWRKEMGLCWKEVAYLGNEVSDEECLKRVGLSGAPADACSTAQKAVGYICKCNGGRGAIREFAEHICLLMEKVNNSCQK

SEQ ID NO: 1377 - protein, 469 aa, Homo sapiens
GGPAKMAASCLVLLALCLLLPLLLLGGWKRWRRGRAARHVVAVVLGDVGRSPRMQYHALSLAMHGFSVTLLGFCNSKPHDELLQNNRIQIVGLTELQSLAVGPRVFQYGVKVVLQAMYLLWKLMWREPGAYIFLQNPPGLPSIAVCWFVGCLCGSKLVIDWHNYGYSIMGLVHGPNHPLVLLAKWYEKFFGRLSHLNLCVTNAMREDLADNWHIRAVTVYDKPASFFKETPLDLQHRLFMKLGSMHSPFRARSEPEDPVTERSAFTERDAGSGLVTRLRERPALLVSSTSWTEDEDFSILLAALEKFEQLTLDGHNLPSLVCVITGKGPLREYYSRLIHQKHFQHIQVCTPWLEAEDYPLLLGSADLGVCLHTSSSGLDLPMKVVDMFGCCLPVCAVNFKCLHELVKHEENGLVFEDSEELAAQLQMLFSNFPDPAGKLNQFRKNLRESQQLRWDESWVQTVLPLVMDT

SEQ ID NO: 1378 - protein, 314 aa, Homo sapiens
  SITE (93): Xaa equals any of the naturally occurring L-amino acids
EKAAGAGKSHLAIVQKVNNEGEGDPFYEVLGLVTLEDVIEEIIKSEILDESDMYTDNRSRKRVSEKNKRDFSAFKDADNELKVKISPQLLLAXHRFLATEVSQFSPSLISEKILLRLLKYPDVIQELKFDEHNKYYARHYLYTRNKPADYFILILQGKVEVEAGKENMKFETGAFSYYGTMALTSVPSDRSPAHPTPLSRSASLSYPDRTDVSTAATLAGSSNQFGSSVLGQYISDFSVRALVDLQYIKITRQQYQNGLLASRMENSPQFPIDGCTTHMENLAEKSELPVVDETTTLLNERNSLLHKASHENAI

SEQ ID NO: 1379 - protein, 131 aa, Homo sapiens
SCPVLKMFPEQQKEEFVSVWVRDPRIQKEDFWHSYIDYEICIHTNSMCFTMKTSCVRRRYREFVWLRQRLQSNALLVQLPELPSKNLFFNMNNRQHVDQRRQGLGNFLRKVLQMHFCFQIAAFTSSLQSHL

SEQ ID NO: 1380 - protein, 219 aa, Homo sapiens
PGAAWSRPDLRGCCTGPQPALRMLVLPSPCPQPLAFSSVETMEGPPRRTCRSPEPGPSSSIGSPQASSPPRPNHYLLIDTQGVPYTVLVDEESQREPGASGAPGQKKCYSCPVCSRVFEYMSYLQRHSITHSEVKPFECDICGKAFKRASHLARHHSIHLAGGGRPHGCPLCPRRFRDAGELAQHSRVHSGERPFQCPHCPRRFMEQNTLQKHTRWKHP

SEQ ID NO: 1381 - protein, 275 aa, Homo sapiens
GVALFKSAAGDQPTAACICIQRQVPPVPAARAPQSRTRSAQAKLALTMPVKGGTKCIKYLLFGFNFIFWLAGIAVLAIGLWLRFDSQTKSIFEQETNNNNSSFYTGVYILIGAGALMMLVGFLGCCGAVQESQCMLGLFFGFLLVIFAIEIAAAIWGYSHKDEVIKEVQEFYKDTYNKLKTKDEPQRETLKAIHYALNCCGLAGGVEQFISDICPKKDVLETFTVKSCPDAIKEVFDNKFHIIGAVGIGIAVVMIFGMIFSMILCCAIRRNREMV

SEQ ID NO: 1382 - protein, 766 aa, Homo sapiens
  SITE (13): Xaa equals any of the naturally occurring L-amino acids
  SITE (17): Xaa equals any of the naturally occurring L-amino acids
  SITE (123): Xaa equals any of the naturally occurring L-amino acids
PCWELVGPPGWQXIRAXPATVHRAEILSFPRSKTSEPAKRGRTASAAMALKDYALEKEKVKKFLQEFYQDDELGKKQFKYGNQLVRLAHREQVALYVDLDDVAEDDPELVDSICENARRYAKXFADAVQELLPQYKEREVVNKDVLDVYIEHRLMMEQRSRDPGMVRSPQNQYPAELMRRFELYFQGPSSNKPRVIREVRADSVGKLVTVRGIVTRVSEVKPKMVVATYTCDQCGAETYQPIQSPTFMPLIMCPSQECQTNRSGGRLYLQTRGSRFIKFQEMKMQEHSDQVPVGNIPRSITVLVEGENTRIAQPGDHVSVTGIFLPILRTGFRQVVQGLLSETYLEAHRIVKMNKSEDDESGAGELTREELRQIAEEDFYEKLAASIAPEIYGHEDVKKALLLLLVGGVDQSPRGMKIRGNINICLMGDPGVAKSQLLSYIDRLAPRSQYTTGRGSSGVGLTAAVLRDSVSGELTLEGGALVLADQGVCCIDEFDKMAEADRTAIHEVMEQQTISIAKAGILTTLNARCSILAAANPAYGRYNPRRSLEQNIQLPAALLSRFDLLWLIQDRPDRDNDLRLAQHITYVHQHSRQPPSQFEPLDMKLMRRYIAMCREKQPMVPESLADYITAAYVEMRREAWASKDATYTSARTLLAILRLSTALARLRMVDVVEKEDVNEAIRLMEMSKDSLLGDKGQTARTQRPADVIFATVRELVSGGRSVRFSEAEQRCVSRGFTPAQFQAALDEYEELNVWQVNASRTRITFV

SEQ ID NO: 1383 - protein, 296 aa, Homo sapiens
FRPGSPRQPRAQPISAPDCTRAMVGRRALIVLAHSERTSFNYAMKEAAAAALKKKGWEVVESDLYAMNFNPIISRKDITGKLKDPANFQYPAESVLAYKEGHLSPDIVAEQKKLEAADLVIFQFPLQWFGVPAILKGWFERVFIGEFAYTYAAMYDKGPFRSKKAVLSITTGGSGSMYSLQGIHGDMNVILWPIQSGILHFCGFQVLEPQLTYSIGHTPADARIQILEGWKKRLENIWDETPLYFAPSSLFDLNFQAGFLMKKEVQDEEKNKKFGLSVGHHLGKSIPTDNQIKARK

SEQ ID NO: 1384 - protein, 165 aa, Homo sapiens
DPRTMNLAISIALLLTVLQVSRGQKVTSLTACLVDQSLRLDCRHENTSSSPIQYEFSLTRETKKHVLFGTVGVPEHTYRSRTNFTSKYNMKVLYLSAFTSKDEGTYTCALHHSGHSPPISSQNVTVLRDKLVKCEGISLLAQNTSWLLLLLLSLSLLQATDFMSL

SEQ ID NO: 1385 - protein, 399 aa, Homo sapiens
HERTPSRPQPDTPRGPPVSRGCSPRHGTGPRLTMAAARHSTLDFMLGAKADGETILKGLQSIFQEQGMAESVHTWQDHGYLATYTNKNGSFANLRIYPHGLVLLDLQSYDGDAQGKEEIDSILNKVEERMKELSQDSTGRVKRLPPIVRGGAIDRYWPTADGRLVEYDIDEVVYDEDSPYQNIKILHSKQFGNILILSGDVNLAESDLAYTRAIMGSGKEDYTGKDVLILGGGDGGILCEIVKLKPKMVTMVEIDQMVIDGCKKYMRKTCGDVLDNLKGDCYQVLIEDCIPVLKRYAKEGREFDYVINDLTAVPISTSPEEDSTWEFLRLILDLSMKVLKQDGKYFTQGNCVNLTEALSLYEEQLGRLYCPVEFSKEIVCVPSYLELWVFYTVWKKAKP

SEQ ID NO: 1386 - protein, 287 aa, Homo sapiens
FDCRDVAFTVGEGEDHDIPIGIDKALEKMQREEQCILYLGPRYGFGEAGKPKFGIEPNAELIYEVTLKSFEKAKESWEMDTKEKLEQAAIVKEKGTVYFKGGKYMQAVIQYGKIVSWLEMEYGLSEKESKASESFLLAAFLNLAMCYLKLREYTKAVECCDKALGLDSANEKGLYRRGEAQLLMNEFESAKGDFEKVLEVNPQNKAARLQISMCQKKAKEHNERDRRYTPTCSRSLQSRMPRKRPIKQWARRLQKGSLMKKEQTVKQWKKRNLRATYDATPRREESQ

SEQ ID NO: 1387 - protein, 206 aa, Homo sapiens
RLPIRQSAADGLRARPLGSNTAPALRVMVQAWYMDDAPGDPRQPHRPDPGRPVGLEQLRRLGVLYWKLDADKYENDPELEKIRRERNYSWMDIITICKDKLPNYEEKIKMFYEEHLHLDDEIRYILDGSGYFDVRDKEDQWIRIFMEKGDMVTLPAGIYHRFTVDEKNYTKAMRLFVGEPVWTAYNRPADHFEARGQYVKFLAQTA

SEQ ID NO: 1388 - protein, 394 aa, Homo sapiens
  SITE (3): Xaa equals any of the naturally occurring L-amino acids
FHXAAHYSLPDGRHGRLDSPTFHLTLHYPTEHVQFWVGSPSTPAGWVREGDTVQLLCRGDGSPSPEYTLFRLQDEQEEVLNVNLEGNLTLEGVTRGQSGTYGCRVEDYDAADDVQLSKTLELRVAYLDPLELSEGKVLSLPLNSSAVVNCSVHGLPTPALRWTKDSTPLGDGPMLSLSSITFDSNGTYVCEASLPTVPVLSRTQNFTLLVQGSPELKTAEIEPKADGSWREGDEVTLICSARGHPDPKLSWSQLGGSPAEPIPGRQGWVSSSLTLKVTSALSRDGISCEASNPHGNKRHVFHFGTVSPQTSQAGVAVMAVAVSVGLLLLVVAVFYCVRRKGGPCCRQRREKGAPPPGEPGLSHSGSEQPEQTGLLMGGASGGARGGSGGFGDEC

SEQ ID NO: 1389 - protein, 264 aa, Homo sapiens
  SITE (16): Xaa equals any of the naturally occurring L-amino acids
VGCRWSRVGPQNPRVXLPPPTLAMFLTRSEYDRGVNTFSPEGRLFQVEYAIEAIKLGSTAIGIQTSEGVCLAVEKRITSPLMEPSSIEKIVEIDAHIGCAMSGLIADAKTLIDKARVETQNHWFTYNETMTVESVTQAVSNLALQFGEEDADPGAMSRPFGVALLFGGVDEKGPQLFHMDPSGTFVQCDARAIGSASEGAQSSLQEVYHKSMTLKEAIKSSLIILKQVMEEKLNATNIELATVQPGQNFHMFTKEELEEVIKDI

SEQ ID NO: 1390 - protein, 178 aa, Homo sapiens
QKLELHRGGGRSRTSGSPGLFGLSARRLLAAAATRGLPAARVRWESSFSRTVVAPSAVAGKRPPEPTTPWQEDPEPEDENLYEKNPDSHGYDKDPVLDVWNMRLVFFFGVSIILVLGSTFVAYLPDYRCTGCPRAWDGMKEWSRREAERLVKYREANGLPIMESNCFDPSKIQLPEDE

SEQ ID NO: 1391 - protein, 133 aa, Homo sapiens [sequence omitted]

SEQ ID NO: 1392 - protein, 401 aa, Homo sapiens
NTVLKKMDEEPERTKRWEGGYERTWEILKEDESGSLKATIEDILFKAKRKRVFEHHGQVRLGMMRHLYVVVDGSRTMEDQDLKPNRLTCTLKLLEYFVEEYFDQNPISQIGIIVTKSKRAEKLTELSGNPRKHITSLKKAVDMTCHGEPSLYNSLSIAMQTLKHMPGHTSREVLIIFSSLTTCDPSNIYDLIKTLKAAKIRVSVIGLSAEVRVCTVLARETGGTYHVILDESHYKELLTHHVSPPPASSSSECSLIRMGFPQHTIASLSDQDAKPSFSMAHLDGNTEPGLTLGGYFCPQCRAKYCELPVECKICGLTLVSAPHLARSYHHLFPLDAFQEIPLEEYNGERFCYGCQGELKDQHVYVCAVCQNVFCVDCDVFVHDSLHCCPGCIHKIPAPSGV

SEQ ID NO: 1393 - protein, 318 aa, Homo sapiens
PEGLPRFNNNFMAPGSASSPSPSFPASRPWAAVGTMAAAAAAGPSPGSGPGDSPEGPEGEAPERRRKAHGMLKLYYGLSEGEAAGRPAGPDPLDPTDLNGAHFDPEVYLDKLRRECPLAQLMDSETDMVRQIRALDSDMQTLVYENYNKFISATDTIRKMKNDFRKMEDEMDRLATNMAVITDFSARISATLQDRHERITKLAGVHALLRKLQFLFELPSRLTKCVELGAYGQAVRYQGRAQAVLQQYQHLPSFRAIQDDCQVITARLAQQLRQRFREGGSGAPEQAECVELLLALGEPAEELCEEFWRTPAAGWRRS

SEQ ID NO: 1394 - protein, 1285 aa, Homo sapiens
FSFPLSSEPFQGSYKVVVQKKSGGRTEHPFTVEEFVLPKFEVQVTVPKIITILEEEMNVSVCGLYTYGKPVPGHVTVSICRKYSDASDCHGEDSQAFCEKFSGQLNSHGCFYQQVKTKVFQLKRKEYEMKLHTEAQIQEEGTVVELTGRQSSEITRTITKLSFVKVDSHFRQGIPFFGQVRLVDGKGVPIPNKVIFIRGNEANYYSNATTDEHGLVQFSINTTNVMGTSLTVRVNYKDRSPCYGYQWVSEEHEEAHHTAYLVFSPSKSFVHLEPMSHELPCGHTQTVQAHYILNGGTLLGLKKLSFYYLIMAKGGIVRTGTHGLLVKQEDMKGHFSISIPVKSDIAPVARLLIYAVLPTGDVIGDSAKYDVENCLANKVDLSFSPSQSLPASHAHLRVTAAPQSVCALRAVDQSVLLMKPDAELSASSVYNLLPEKDLTGFPGPLNDQDDEDCINRHNVYINGITYTPVSSTNEKDMYSFLEDMGLKAFTNSKIRKPKMCPQLQQYEMHGPEGLRVGFYESDVMGRGHARLVHVEEPHTETVRKYFPETWIWDLVVVNSAGVAEVGVTVPDTITEWKAGAFCLSEDAGLGISSTASLRAFQPFFVELTMPYSVIRGEAFTLKATVLNYLPKCIRVSVQLEASPAFLAVPVEKEQAPHCICANGRQTVSWAVTPKSLGNVNFTVSAEALESQELCGTEVPSVPEHGRKDTVIKPLLVEPEGLEKETTFNSLLCPSGGEVSEELSLKLPPNVVEESARASVSVLGDILGSAMQNTQNLLQMPYGCGEQNMVLFAPNIYVLDYLNETQQLTPEIKSKAIGYLNTGYQRQLNYKHYDGSYSTFGERYGRNQGNTWLTAFVLKTFAQARAYIFIDEAHITQALIWLSQRQKDNGCFRSSGSLLNNAIKGGVEDEVTLSAYITIALLEIPLTVTHPVVRNALFCLESAWKTAQEGDHGSHVYTKALLAYAFALAGNQDKRKEVLKSLNEEAVKKDNSVHWERPQKPKAPVGHFYEPQAPSAEVEMTSYVLLAYLTAQPAPTSEDLTSATNIVKWITKQQNAQGGFSSTQDTVVALHALSKYGAATFTRTGKAAQVTIQSSGTFSSKFQVDNNNRLLLQQVSLPELPGEYSMKVTGEGCVYLQTSLKYNILPEKEEFPFALGVQTLPQTCDEPKAHTSFQISLSVSYTGSRSASNMAIVDVKMVSGFIPLKPTVKMLERSNHVSRTEVSSNHVLIYLDKVSNQTLSLFFTVLQDVPVRDLKPAIVKVYDYYETDEFAIAEYNAPCSKDLGNA

SEQ ID NO: 1395 - protein, 75 aa, Homo sapiens
ITKNIYSDLKDLSAKNQSISCPSIIVHACLLLFTCSSAQTVSNLGTPFGADKYSSAFSPQIYNDFNIPKNIGISE

SEQ ID NO: 1396 - protein, 920 aa, Homo sapiens
RTRGIHGEMRLFVSDGVPGCLPVLAAAGRARGRAEVLISTVGPEDCVVPFLTRPKVPVLQLDSGNYLFSTSAICRYFFLLSGWEQDDLTNQWLEWEATELQPALSAALYYLVVQGKKGEDVLGSVRRALTHIDHSLSRQNCPFLAGETESLADIVLWGALYPLLQDPAYLPEELSALHSWFQTLSTQEPCQRAAETVLKQQGVLALRPYLQKQPQPSPAEGRAVTNEPEEEELATLSEEEIAMAVTAWEKGLESLPPLRPQQNPVLPVAGERNVLITSALPYVNNVPHLGNIIGCVLSADVFARYSRLRQWNTLYLCGTDEYGTATETKALEEGLTPQEICDKYHIIHADIYRWFNISFDIFGRTTTPQQTKITQDIFQQLLKRGFVLQDTVEQLRCEHCARFLADRFVEGVCPFCGYEEARGDQCDKCGKLINAVELKKPQCKVCRSCPVVQSSQHLFLDLPKLEKRLEEWLGRTLPGSDWTPNAQFITRSWLRDGLKPRCITRDLKWGTPVPLEGFEDKVFYVWFDATIGYLSITANYTDQWERWWKNPEQVDLYQFMAKDNVPFHSLVFPCSALGAEDNYTLVSHLIATEYLNYEDGKFSKSRGVGVFGDMAQDTGIPADIWRFYLLYIRPEGQDSAFSWTDLLLKNNSELLNNLGNFINRAGMFVSKFFGGYVPEMVLTPDDQRLLAHVTLELQHYHQLLEKVRIRDALRSILTISRHGNQYIQVNEPWKRIKGSEADRQRAGTVTGLAVNIAALLSVMLQPYMPTVSATIQAQLQLPPPACSILLTNFLCTLPAGHQIGTVSPLFQKLENDQIESLRQRFGGGQAKTSPKPAVVETVTTAKPQQIQALMDEVTKQGNIVRELKAQKADKNEVAAEVAKLLDLKKQLAVAEGNPLKPLKARRKSKRPWLIESHFNR

SEQ ID NO: 1397 - protein, 476 aa, Homo sapiens
  SITE (127): Xaa equals any of the naturally occurring L-amino acids
KMAALTTLFKYIDENQDRYIKKLAKWVAIQSVSAWPEKRGEIRRMMEVAAADVKQLGGSVELVDIGKQKLPDGSEIPLPPILLGRLGSDPQKKTVCIYGHLDVQPAALEDGWDSEPFTLVERDGKLXGRGSTDDKGPVAGWINALEAYQKTGQEIPVNVRFCLEGMEESGSEGLDELIFARKDTFFKDVDYVCISDNYWLGKKKPCITYGLRGICYFFIEVECSNKDLHSGVYGGSVHEAMTDLILLMGSLVDKRGNILIPGINEAVAAVTEEEHKLYDDIDFDIEEFAKDVGAQILLHSHKKDILMHRWRYPSLSLHGIEGAFSGSGAKTVIPRKVVGKFSIRLVPNMTPEVVGEQVTSYLTKKFAELRSPNEFKVYMGHGGKPWVSDFSHPHYLAGRRAMKTVFGVEPDLTREGGSIPVTLTFQEATGKNVMLLPVGSADDGAHSQNEKLNRYNYIEGTKMLAAYLYEVSQLKD

SEQ ID NO: 1398 - protein, 187 aa, Homo sapiens
  SITE (4): Xaa equals any of the naturally occurring L-amino acids
LHLXPTSISSSSSCSVSSVVSQRLTESPCALVASQYGWSGNMERIMKAQAYQTGKDISTNYYASQKKTFEINPRHPLIRDMLRRIKEDEDDKTVLDLAVVLFETATLRSGYLLPDTKAYGDRIERMLRLSLNIDPDAKVEEEPEEEPEETAEDTTEDTEQDEDEEMDVGTDEEEETAKESTAEKDEL

SEQ ID NO: 1399 - protein, 376 aa, Homo sapiens
KSSTGVIPDEAKALSLLAPANAVAGLLPGGGLLPTPNPLTQIGAVPLAALGAPTLDPALAALGLPGANLNSQSLAADQLLKLMSTVDPKLNHVAAGLVSPSLKSDTSSKEIEEAMKRVREAQSLISAAIEPDKKEEKRRHSRSRSRSRRRRTPSSSRHRRSRSRSRRRSHSKSRSRRRSKSPRRRRSHSRERGRRSRSTSKTRDKKKEDKEKKRSKTPPKSYSTARRSRSASRERRRRRSRSGTRSPKKPRSPKRKLSRSPSPRRHKKEKKKDKDKERSRDERERSTSKKKKSKDKEKDRERKSESDKDVKQVTRDYDEEEQGYDSEKEKKEEKKPIETGSPKTKECSVEKGTGDSLRESKVNGDDHHEEDMDMSD

SEQ ID NO: 1400 - protein, 112 aa, Homo sapiens
  SITE (21): Xaa equals any of the naturally occurring L-amino acids
TAGLTSRGWGSLPPSLETFLXWLKSRKENECTSRLAQSLSPSSSLFPAGPSGLYGPDGGLRKMRGLWFSGIPAGATPSCLQMVHVPIPPSRPLLCLLCHRDSQQRFFFVLAV

SEQ ID NO: 1401 - protein, 69 aa, Homo sapiens
RRQVGAAAVAMTRGNQRELARQKNMKKQSDSVKGKRRDDGLSAAARKQRDSEIMQQKQKKANEKKEEPK

SEQ ID NO: 1402 - protein, 177 aa, Homo sapiens
  SITE (6): Xaa equals any of the naturally occurring L-amino acids
  SITE (162): Xaa equals any of the naturally occurring L-amino acids
  SITE (166): Xaa equals any of the naturally occurring L-amino acids
RPPRRXPMDGPAIITQVTNPKEDEGRLPGAGEKASQCNVSLKKQRSRSILSSFFCCFRDYNVEAPPPSSPSVLPPLVEENGGLQKPPAKYLLPEVTVLDYGKKCVVIDLDETLVHSSFKPISNADFIVPVEIDGTIHQVYVLKRPHVDEFLQRMGQLLNVCXLLPXGQVCRPVADLL

SEQ ID NO: 1403 - protein, 82 aa, Homo sapiens
KHILSTFETSVLEGRLHKLSSPRLRRLQSGKLTCRNGVPFMLYLDKGNQKWNQCRQNLGFAASINQSMTNRGSLKCKGTNFT

SEQ ID NO: 1404 - protein, 251 aa, Homo sapiens
  SITE (37): Xaa equals any of the naturally occurring L-amino acids
  SITE (41): Xaa equals any of the naturally occurring L-amino acids
TTKPATTPSSTTRTCRRSPSTLPSATWTPLASRTAHXLPRXYMYPSMDQLAEMLPGVLQQFGLKSIIGMGTGAGAYILTRFALNNPEMVEGLVLINVNPCAEGWMDWAASKISGWTQALPDMVVSHLFGKEEMQSNVEVVHTYRQHIVNDMNPGNLHLFINAYNSRRDLEIERPMPGTHTVTLQCPALLVVGDSSPAVDAVVECNSKLDPTKTTLLKMADCGGLPQISQPAKLAEAFKYFVQGMGYMPRLA

SEQ ID NO: 1405 - protein, 127 aa, Homo sapiens
FEGFYSGRKNRTKVYVPSSVVLIDLFFLFETKVVSVFWFSGNMYYIVLKECCPTNYSSKQRIVTINKVSVTLLPLSHNIHCRALCRSKNRAAQNLCGSFLSFCNLRHMFQRTGIFVWSSDLGDHSHN

SEQ ID NO: 1406 - protein, 230 aa, Homo sapiens
  SITE (90): Xaa equals any of the naturally occurring L-amino acids
  SITE (112): Xaa equals any of the naturally occurring L-amino acids
  SITE (118): Xaa equals any of the naturally occurring L-amino acids
  SITE (169): Xaa equals any of the naturally occurring L-amino acids
  SITE (190): Xaa equals any of the naturally occurring L-amino acids
  SITE (192): Xaa equals any of the naturally occurring L-amino acids
  SITE (194): Xaa equals any of the naturally occurring L-amino acids
  SITE (217): Xaa equals any of the naturally occurring L-amino acids
  SITE (218): Xaa equals any of the naturally occurring L-amino acids
AERPLQVPRSAGEAAPHSRRPPGLLPHAPRAASAQLEERRRDPHPGMTLQEGDCRGSQTVSLTMGTADSDEMAPEAPQHTHIDVHIHQEXALAKLLLTCCSALRPRATQARXSSRLLXASWVMQIVLGILSAVLGGFFYIRDYTLLVTSGAASGQGLWLCCWSCCLHLXETGWYILGPAEDSANAGKLSXQXSXASNFGNEEFRYGLLLITTSGWPXXQVRVDWNTSSPQ

SEQ ID NO: 1407 - protein, 79 aa, Homo sapiens
RGHFLLPDLDIPSNPSSYSMLKEKYSQMHYVNGEKKHSIVETPILANVFWSVFHFTVYIPALKTQGQVLTKEVCSHSKY

SEQ ID NO: 1408 - protein, 289 aa, Homo sapiens
VRPPSHVTADSGRSPLSLTYLPLQEPGDMAAAVPRAAFLSPLLPLLLGFLLLSAPHGGSGLHTKGALPLDTVTFYKVIPKSKFVLVKFDTQYPYGEKQDEFKRLAENSASSDDLLVAEVGISDYGDKLNMELSEKYKLDKESYPVFYLFRDGDFENPVPYTGAVKVGAIQRWLKGQGVYLGMPGCLPVYDALAGEFIRASGVEARQALLKQGQDNLSSVKETQKKWAEQYLKIMGKILDQGEDFPASEMTRIARLIEKNKMSDGKKEELQKSLNILTAFQKKGAEKEEL

SEQ ID NO: 1409 - protein, 488 aa, Homo sapiens
PASAGTVSEGPPGTDGSAGRGGTAFAMAATVNLELDPIFLKALGFLHSKSKDSAEKLKALLDESLARGIDSSYRPSQKDVEPPKISSTKNISIKQEPKISSSLPSGNNNGKVLTTEKVKKEAEKRPADKMKSDITEGVDIPKKPRLEKPETQSSPITVQSSKDLPMADLSSFEETSADDFAMEMGLACVVCRQMMVASGNQLVECQECHNLYHRDCHKPQVTDKEANDPRLVWYCARCTRQMKRMAQKTQKPPQKPAPAVVSVTPAVKDPLVKKPETKLKQETTFLAFKRTEVKTSTVISGNSSSASVSSSVTSGLTGWAAFAAKTSSAGPSTAKLSSTTQNNTGKPATSSANQKPVGLTGLATSSKGGIGSKIGSNNSTTPTVPLKPPPPLTLGKTGLSRSVSCDNVSKVGLPSPSSLVPGSSSQLSGNGNSGTSGPSGSTTSKTTSESSSSPSASLKGPTSQESQLNAMKRLQMVKKKAAQKKLKK

SEQ ID NO: 1410 - protein, 64 aa, Homo sapiens
  SITE (53): Xaa equals any of the naturally occurring L-amino acids
HYGLKLAVKMPNTVVPWNPVYSCAKQNCKIVKMSYQVIRRLQRHHLFFISFFXLTHVVVIFNTF

SEQ ID NO: 1411 - protein, 129 aa, Homo sapiens
AACLALRIAAAMASQSQGIQQLLQAEKRAAEKVSEARKRKNRRLKQAKEEAQAEIEQYRLQREKEFKAKEAAALGSRGSCSTEVEKETQEKMTILQTYFRQNRDEVLDNLLAFVCDIRPEIHENYRING

SEQ ID NO: 1412 - protein, 177 aa, Homo sapiens
VTVPSSSAAGTLFQGLCGAPDAPHPLSKIPGGRGGGRDPSLSALIYKDEKLTVTQDLPVNDGKPHIVHFQYEVTEVKVSSWDAVLSSQSLFVEIPDGLLADGSKEGLLALLEFAEEKMKVNYVFICFRKGREDRAPLLKTFSFLGFEIVRPGHPCVPSRPDVMFMVYPLDQNLSDED

SEQ ID NO: 1413 - protein, 112 aa, Homo sapiens
SGLRLAMSTNNMSDPRRPNKVLRYKPPPSECNPALDDPTPDYMNLLGMIFSMCGLMLKLKWCAWVAVYCSFISFANSRSSEDTKQMMSSFMLSISAVVMSYLQNPQPMTPPW

SEQ ID NO: 1414 - protein, 186 aa, Homo sapiens
CLGGRPRCVLRLTANLEGRRDSATHAPPHPRLRVKRAVGPESPPLWQWPPLYSILPSGRSAVNKRWAPQSTCPPTALAVLGSSLQFTGNKPESARTRGCSPGSARPPLSPATGWRCRARAAASRRFPGAPGPEERSPQSKGGNTCLRCKEILFQSIPVVQTDTVPNERSDVFSSPFLICFLTGLRF

SEQ ID NO: 1415 - protein, 108 aa, Homo sapiens
  SITE (46): Xaa equals any of the naturally occurring L-amino acids
  SITE (68): Xaa equals any of the naturally occurring L-amino acids
TKTTLFLERPLFKKESITPTVELNALCMKLGKKPMYKPVDPYSRMXSTYNYNMRGGAYPPRYFYPFPXPPLLYQVELSVGGQQFNGKGKTRQAAKHDAAAKAVEDPAE

SEQ ID NO: 1416 - protein, 621 aa, Homo sapiens
AGHRAGVCSLSATRLLLPKDRGVGRRQTMWTLVSWVALTAGLVAGTRCPDGQFCPVACCLDPGGASYSCCRPLLDKWPTTLSRHLGGPCQVDAHCSAGHSCIFTVSGTSSCCPFPEAVACGDGHHCCPRGFHCSADGRSCFQRSGNNSVGAIQCPDSQFECPDFSTCCVMVDGSWGCCPMPQASCCEDRVHCCPHGAFCDLVHTRCITPTGTHPLAKKLPAQRTNRAVALSSSVMCPDARSRCPDGSTCCELPSGKYGCCPMPNATCCSDHLHCCPQDTVCDLIQSKCLSKENATTDLLTKLPAHTVGDVKCDMEVSCPDGYTCCRLQSGAWGCCPFTQAVCCEDHIHCCPAGFTCDTQKGTCEQGPHQVPWMEKAPAHLSLPDPQALKRDVPCDNVSSCPSSDTCCQLTSGEWGCCPIPEAVCCSDHQHCCPQGYTCVAEGQCQRGSEIVAGLEKMPARRASLSHPRDIGCDQHTSCPVGQTCCPSLGGSWACCQLPHAVCCEDRQHCCPAGYTCNVKARSCEKEVVSAQPATFLARSPHVGVKDVECGEGHFCHDNQTCCRDNRQGWACCPYRQGVCCADRRHCCPAGFRCAARGTKCLRREAPRWDAPLRDPALRQLL

SEQ ID NO: 1417 - protein, 340 aa, Homo sapiens
  SITE (10): Xaa equals any of the naturally occurring L-amino acids
  SITE (24): Xaa equals any of the naturally occurring L-amino acids
SAHASERIAXSGCGAPAAGAGPRXRSLGADPGRAARRHEGQGGEGGRRTAGRWRRKPEKSPSAQELKEQGNRLFVGRKYPEAAACYGRAITRNPLVAVYYTNRALCYLKMQQHEQALADCRRALELDGQSVKAHFFLGQCQLEMESYDEAIANLQRAYSLAKEQRLNFGDDIPSALRIAKKKRWNSIEERRIHQESELHSYLSRLIAAERERELEECQRNHEGDEDDSHVRAQQACIEAKHDKYMADMDELFSQVDEKRKKRDIPDYLCGKISFELMREPCITPSGITYDRKDIEEHLQRVGHFDPVTRSPLTQEQLIPNLAMKEVIDAFISENGWVEDY

SEQ ID NO: 1418 - protein, 235 aa, Homo sapiens
SPRPLRFCGGARARRPLSAVARPARSSDPLRSAPLGPAPPVNMIRCGLACERCRWILPLLLLSAIAFDIIALAGRGWLQSSDHGQTSSLWWKCSQEGGGSGSYEEGCQSLMEYAWGRAAAAMLFCGFIILVICFILSFFALCGPQMLVFLRVIGGLLALAAVFQIISLVIYPVKYTQTFTLHANRAVTYIYNWAYGFGWAATIILIGCAFFFCCLPNYEDDLLGNAKPRYFYTSA

SEQ ID NO: 1419 - protein, 86 aa, Homo sapiens
RRQALQERCPFNPLSALDRRCCVKLLMDIYMRSSFLYAIPAVFFFLTGPCLRINKSVMSETKVYSSVCRCVAPPFSPAAPHIQSRS

SEQ ID NO: 1420 - protein, 351 aa, Homo sapiens
TWCTTTMLAARLVCLRTLPSRVFHPAFTKASPVVKNSITKNQWLLTPSREYATKTRIGIRRGRTGQELKEAALEPSMEKIFKIDQMGRWFVAGGAAVGLGALCYYGLGLSNEIGAIEKAVIWPQYVKDRIHSTYMYLAGSIGLTALSAIAISRTPVLMNFMMRGSWVTIGVTFAAMVGAGMLVRSIPYDQSPGPKHLAWLLHSGVMGAVVAPLTILGGPLLIRAAWYTAGIVGGLSTVAMCAPSEKFLNMGAPLGVGLGLVFVSSLGSMFLPPTTVAGATLYSVAMYGGLVLFSMFLLYDTQKVIKRAEVSPMYGVQKYDPINSMLSIYMDTLNIFMRVATMLATGGNRKK

SEQ ID NO: 1421 - protein, 81 aa, Homo sapiens
  SITE (3): Xaa equals any of the naturally occurring L-amino acids
CGXLLMAQGLSASALEGLKTEEGSVRGALPAVSSPPAPVSPSSPTTHNGELEPSFSPLLGEGKTPETLLPQKCWGQGGPGR

SEQ ID NO: 1422 - protein, 484 aa, Homo sapiens
ACRSTLVDPKNSAQERRALGPLPPCSFALQLGMAGYLRVVRSLCRASGSRPAWAPAALTAPTSQEQPRRHYADKRIKVAKPVVEMDGDEMTRIIWQFIKEKLILPHVDIQLKYFDLGLPNRDQTDDQVTIDSALATQKYSVAVKCATITPDEARVEEFKLKKMWKSPNGTIRNILGGTVFREPIICKNIPRLVPGWTKPITIGRHAHGDQYKATDFVADRAGTFKMVFTPKDGSGVKEWEVYNFPAGGVGMGMYNTDESISGFAHSCFQYAIQKKWPLYMSTKNTILKAYDGRFKDIFQEIFDKHYKTDFDKNKIWYEHRLIDDMVAQVLKSSGGFVWACKNYDGDVQSDILAQGFGSLGLMTSVLVCPDGKTIEAEAAHGTVTRHYREHQKGRPTSTNPIASIFAWTRGLEHRGKLDGNQDLIRFAQMLEKVCVETVESGAMTKDLAGCIHGLSNVKLNEHFLNTTDFLDTIKSNLDRALGRQ

SEQ ID NO: 1423 - protein, 240 aa, Homo sapiens
  SITE (153): Xaa equals any of the naturally occurring L-amino acids
VRIPGSTHASGGGDGDMESGAYGAAKAGGSFDLRRFLTQPQVVARAVCLVFALIVFSCIYGEGYSNAHESKQMYCVFNRNEDACRYGSAIGVLAFLASAFFLVVDAYFPQISNATDRKYLVIGDLLFSALWTFLWFVGFCFLTNQWAVTNPKXVLVGADSVRAAITFSFFSIFSWGVLASLAYQRYKAGVDDFIQNYVDPTPDPNTAYASYPGASVDNYQQPPFTQNAETTEGYQPPPVY

SEQ ID NO: 1424 - protein, 244 aa, Homo sapiens
  SITE (59): Xaa equals any of the naturally occurring L-amino acids
  SITE (62): Xaa equals any of the naturally occurring L-amino acids
  SITE (221): Xaa equals any of the naturally occurring L-amino acids
RVRRQSSGNLTMAWTPLLLPLLTFCTVSEASYELTQPPSVSVSPGQTARITCSGDALPXKYXYWYQQKSGQAPVLVIYEDTRRPSAIPERFSASSSGTMATLTISGAQVEDEADYYCYSTDSSSYYRVFGGGTKLTVLGQPKAAPSVTLFPPSSEELQANKATLVCLISDFYPGAVTVAWKADSSPVKAGVETTTPSKQSNNKYAASSYLSLTPEQWKSHXSYSCQVTHEGSTVEKTVAPTECS

SEQ ID NO: 1425 - protein, 173 aa, Homo sapiens
  SITE (1): Xaa equals any of the naturally occurring L-amino acids
  SITE (115): Xaa equals any of the naturally occurring L-amino acids
  SITE (136): Xaa equals any of the naturally occurring L-amino acids
  SITE (137): Xaa equals any of the naturally occurring L-amino acids
  SITE (159): Xaa equals any of the naturally occurring L-amino acids
XVRVQTRGSADPAQLRRHPGYKRTASATLSDPAAAAMQPSSLLPLALCLLAAPASALVRIPLHKFTSIRRTMSEVGGSVEDLIAKGPVSKYSQAVPAVTEGPIPEVLKNYMDAQXYGEIGIGTPPQCFTVVFDTGXXNLWVPSIHCKLLDIACWIHHKXNSDKSSNYVKNGNS

SEQ ID NO: 1426 - protein, 351 aa, Homo sapiens
  SITE (35): Xaa equals any of the naturally occurring L-amino acids
IRHEILWLLCSHRPAPGRPPTHNAHNWRLGQAPAXWYNDTYPLSPPQRTPAGIRYRIAVIADLDTESRAQEENTWFSYLKKGYLTLSDSGDKVAVEWDKDHGVLESHLAEKGRGMELSDLIVFNGKLYSVDDRTGVVYQIEGSKAVPWVILSDGDGTVEKGFKAEWLAVKDERLYVGGLGKEWTTTTGDVVNENPEWVKVVGYKGSVDHENWVSNYNALRAAAGIQPPGYLIHESACWSDTLQRWFFLPRRASQERYSEKDDERKGANLLLSASPDFGDIAVSHVGAVVPTHGFSSFKFIPNTDDQIIVALKSEEDSGRVASYIMAFTLDGRFLLPETKIGSVKYEGIEFI

SEQ ID NO: 1427 - protein, 510 aa, Homo sapiens
ERSWFAQVRRLGPHGAVARLRVRGLPGAGRGLRLPAGARAARLGAALSLELAVSGARACAPGTRLPRGPVGGSWDALIVRPVRRWRRVAVGVNACVDVVLSGVKLLQALGLSPGNGKDHSILHSRNDLEEAFIHFMGKGAAAERFFSDKETFHDIAQVASEFPGAQHYVGGNAALIGQKFAANSDLKVLLCGPVGPKLHELLDDNVFVPPESLQEVDEFHLILEYQAGEEWGQLKAPHANRFIFSHDLSNGAMNMLEVFVSSLEEFQPDLVVLSGLHMMEGQSKELQRKRLLEVVTSISDIPTGIPVHLELASMTNRELMSSIVHQQVFPAVTSLGLNEQELLFLTQSASGPHSSLSSWNGVPDVGMVSDILFWILKEHGRSKSRASDLTRIHFHTLVYHILATVDGHWANQLAAVAAGARVAGTQACATETIDTSRVSLRAPQEFMTSHSEAGSRIVLNPNKPVVEWHREGISFHFTPVLVCKDPIRTVGLGDAISAEGLFYSEVHPHY

SEQ ID NO: 1428 - protein, 316 aa, Homo sapiens
PPLPPRSFPNLFSRPEPLPEPGRRGCNRSREPAARAPSPPPPFEGAPGRAMVKVTFNSALAQKEAKKDEPKSGEEALIIPPDAVAVDCKDPDDVVPVGQRRAWCWCMCFGLAFMLAGVILGGAYLYKYFALQPDDVYYCGIKYIKDDVILNEPSADAPAALYQTIEENIKIFEEEEVEFISVPVPEFADSDPANIVHDFNKKLTAYLDLNLDKCYVIPLNTSIVMPPRNLLELLINIKAGTYLPQSYLIHEHMVITDRIENIDHLGFFIYRLCHDKETYKLQRRETIKGIQKREASNCFAIRHFENKFAVETLICS

SEQ ID NO: 1429 - protein, 398 aa, Homo sapiens
HTRVDFNVPMKNNQITNNQRIKAAVPSIKFCLDNGAKSVVLMSHLGRPDGVPMPDKYSLEPVAVELKSLLGKDVLFLKDCVGPEVEKACANPAAGSVILLENLRFHVEEEGKGKDASGNKVKAEPAKIEAFRASLSKLGDVYVNDAFGTAHRAHSSMVGVNLPQKAGGFLMKKELNYFAKALESPERPFLAILGGAKVADKIQLINNMLDKVNEMIIGGGMAFTFLKVLNNMEIGTSLFDEEGAKIVKDLMSKAEKNGVKITLPVDFVTADKFDENAKTGQATVASGIPAGWMGLDCGPESSKKYAEAVTRAKQIVWNGPVGVFEWEAFARGTKALMDEVVKATSRGCITIIGGGDTATCCAKWNTEDKVSHVSTGGGASLELLEGKVLPGVDALSNI

SEQ ID NO: 1430 - protein, 249 aa, Homo sapiens
  SITE (245): Xaa equals any of the naturally occurring L-amino acids
PAMGAAVFFGCTFVAFGPAFALFLITVAGDPLRVIILVAGAFFWLVSLLLASVVWFILVHVTDRSDARLQYGLLIFGAAVSVLLQEVFRFAYYKLLKKADEGLASLSEDGRSPISIRQMAYVSGLSFGIISGVFSVINILADALGPGVVGIHGDSPYYFLTSAFLTAAIILLHTFWGVVFFDACERRRYWALGLVVGSHLLTSGLTFLNPWYEASLLPIYAVTVSMGLWAFITAGGSLRSIQRSXLCKD

SEQ ID NO: 1431 - protein, 271 aa, Homo sapiens
RPTRPVMAPRSLLLLLSGALALTDTWAGSHSLRYFSTAVSRPGRGEPRYIAVEYVDDTQFLRFDSDAAIPRMEPREPWVEQEGPQYWEWTTGYAKANAQTDRVALRNLLRRYNQSEAGSHTLQGMNGCDMGPDGRLLRGYHQHAYDGKDYISLNEDLRSWTAADTVAQITQRFYEAEEYAEEFRTYLEGECLELLRRYLENGKETLQRADPPKAHVAHHPISDHEATLRCWALGFYPAEITLTWQRDGEEQTQDTELVETRPAGDGTFRSG

SEQ ID NO: 1432 - protein, 455 aa, Homo sapiens [sequence omitted]

SEQ ID NO: 1433 - protein, 87 aa, Homo sapiens [sequence omitted]

SEQ ID NO: 1434 - protein, 110 aa, Homo sapiens
VWRAGAGMASLRSQHGPGAPESLRKVLMPSSMGLLLILYARLPPSLVGQAGRWIGWAGRAGGQAVRQPSPTVLIDGVECSDVKFFQLAAQWSSHVKHFPICIFGHSKATF

SEQ ID NO: 1435 - protein, 103 aa, Homo sapiens
GSQDARRGSGLGVSSFLRGSGGSGPLWVQHGKRGRYFSSWAFIKEKTMLAGRGGSRLQSQHFGRPRRVDHLRSGVQDQPGQHGETPSLLKNTKISQVWWLTLM

SEQ ID NO: 1436 - protein, 413 aa, Homo sapiens
NECTGPEFRVDPRVASAPRAQSLAFADPPPVHTRRQLTMDDDIAALVVDNGSGMCKAGFAGDDAPRAVFPSIVGRPRHQGVMVGMGQKDSYVGDEAQSKRGILTLKYPIEHGIVTNWDDMEKIWHHTFYNELRVAPEEHPVLLTEAPLNPKANREKMTQIMFETFNTPAMYVAIQAVLSLYASGRTTGIVMDSGDGVTHTVPIYEGYALPHAILRLDLAGRDLTDYLMKILTERGYSFTTTAEREIVRDIKEKLCYVALDFEQEMATAASSSSLEKSYELPDGQVITIGNERFRCPEALFQPSFLGMESCGIHETTFNSIMKCDVDIRKDLYANTVLSGGTTMYPGIADRMQKEITALAPSTMKIKIIAPPERKYSVWIGGSILASLSTFQQMWISKQEYDESGPSIVHRKCF

SEQ ID NO: 1437 - protein, 97 aa, Homo sapiens
  SITE (28): Xaa equals any of the naturally occurring L-amino acids
VVPSTKDFLVGVKGSGGHRGGGEMAFSXSQAPYLSPAVPFSGTIQGGLQDGLQITVNGTVLSSSGTSGNDIAFHFNPRFEDGGYVVCTAGRTEAGGP

SEQ ID NO: 1438 - protein, 153 aa, Homo sapiens
LAPLRCQPGTRTQPRSHPAANDPSAAMSAAGARGLRATYHRLLDKVELMLPEKLRPLYNHPAGPRTVFFWAPIMKWGLVCAGLADMARPAEKLSTAQSAVLMATGFIWSRYSLVIIPKNWSLFAVNFFVGAAGASQLFRIWRYNQELKAKAHK

SEQ ID NO: 1439 - protein, 343 aa, Homo sapiens
  SITE (244): Xaa equals any of the naturally occurring L-amino acids
  SITE (305): Xaa equals any of the naturally occurring L-amino acids
  SITE (325): Xaa equals any of the naturally occurring L-amino acids
  SITE (328): Xaa equals any of the naturally occurring L-amino acids
  SITE (340): Xaa equals any of the naturally occurring L-amino acids
WIQRIRARGKTNLRRTTYLVLDEADRMLDMGFEPQIRKIVDQIRPDRQTLMWSATWPKEVRQLAEDFLKDYIHINIGALELSANHNILQIVDVCHDVEKDEKLIRLMEEIMSEKENKTIVFVETKRRCDELTRKMRRDGWPAMGIHGDKSQQERDWVLNEFKHGKAPILIATDVASRGLDVEDVKFVINYDYPNSSEDYIHRIGRTARSTKTGTAYTFFTPNNIKQVSDLISVLREANQAINPXLLQLVEDRGSGRSRGRGGMKDDRRDRYSAGKRGGFNTFRDRENYDRGYSSLLKRDFGAKTXNGGYSACKFTNGSFGSNFGXCWXSGPVLGLGIPTXALP

SEQ ID NO: 1440 - protein, 122 aa, Homo sapiens
ICVSARRALSGLEHGLGWERVWEKMGNKEPGSHGHRSDADPSRFSPVLPPAVQLGVWREEGRGGSCPFSWGRGPVSSTWLFPKGSKREGLGEKTMERGPAKENREEVSGLISLLSRCSGSLI

SEQ ID NO: 1441 - protein, 74 aa, Homo sapiens [sequence omitted]

SEQ ID NO: 1442 - protein, 103 aa, Homo sapiens
  SITE (2): Xaa equals any of the naturally occurring L-amino acids
  SITE (3): Xaa equals any of the naturally occurring L-amino acids
AXXHQPSLKGTKAGAPPRCGRSRTSGSPGLQEFGTREAEAGVQWCDLGSLQPLPPRFQQFSCLSLPSGWDDRRLPSCLTSFCIFSRDGVSPCWPGWSQTPDLR

SEQ ID NO: 1443 - protein, 106 aa, Homo sapiens
  SITE (48): Xaa equals any of the naturally occurring L-amino acids
  SITE (53): Xaa equals any of the naturally occurring L-amino acids
  SITE (57): Xaa equals any of the naturally occurring L-amino acids
  SITE (58): Xaa equals any of the naturally occurring L-amino acids
  SITE (63): Xaa equals any of the naturally occurring L-amino acids
  SITE (66): Xaa equals any of the naturally occurring L-amino acids
  SITE (70): Xaa equals any of the naturally occurring L-amino acids
  SITE (72): Xaa equals any of the naturally occurring L-amino acids
  SITE (83): Xaa equals any of the naturally occurring L-amino acids
  SITE (99): Xaa equals any of the naturally occurring L-amino acids
  SITE (100): Xaa equals any of the naturally occurring L-amino acids
  SITE (102): Xaa equals any of the naturally occurring L-amino acids
LHAAACAAAMSLVIPEKFQHILRVLNTNIDGRRKIAFAITAIKGVGRXYAHVXLRKXXIDLTXRAXELTXDXVERVITIMQNXRQYKIPDWFLNRQNDXXDXSTSS

SEQ ID NO: 1444 - protein, 14 aa, Homo sapiens
PVWPKWSGWPLALP

SEQ ID NO: 1445 - protein, 126 aa, Homo sapiens
  SITE (104): Xaa equals any of the naturally occurring L-amino acids
  SITE (119): Xaa equals any of the naturally occurring L-amino acids
  SITE (123): Xaa equals any of the naturally occurring L-amino acids
  SITE (124): Xaa equals any of the naturally occurring L-amino acids
FLRLVLGLLIGRCLQEMLKLGTLPPTSKPQLLCQMVSLKISACLTTKGKYVVFFFYPLDFTFVCPTEIIAFSDRAEEFKKLNCQVIGASVDSHFCHLAWVNTPXKQGGLGPMNIPLVSXPTHXXSG

SEQ ID NO: 1446 - protein, 97 aa, Homo sapiens
  SITE (92): Xaa equals any of the naturally occurring L-amino acids
CDKEKNLLHVTDTGVGMTREELVKNLGTIAKSGTSEFLNKMTEAQEDGQSTSDLIGQFGVGFYSAFLVADKVIVTSKHNNDTQHIWESDSNXFSVNC

SEQ ID NO: 1447 - protein, 47 aa, Homo sapiens
HSRHRGVFLTPLLAMSSHKTFRIKRFLAKKQKQNRPIPQWIRMKTGK

SEQ ID NO: 1448 - protein, 106 aa, Homo sapiens
  SITE (85): Xaa equals any of the naturally occurring L-amino acids
  SITE (104): Xaa equals any of the naturally occurring L-amino acids
VFRVEAWRTSGETPAISPSKRARPAEVGGMQLRFARLSEHATAPTRGSARAAGYDLYSAYDYTIPPMEKAVVKTDIQIALPSGCXGRVAPRSGLAAKHFIDVGXVS

SEQ ID NO: 1449 - protein, 60 aa, Homo sapiens
  SITE (41): Xaa equals any of the naturally occurring L-amino acids
  SITE (44): Xaa equals any of the naturally occurring L-amino acids
TMAVGKNKRLTKGGKKGAKKKVVDPFFKKDWYDVKAPAMFXIRXIGKTLVTRTQGTKIAS

SEQ ID NO: 1450 - protein, 45 aa, Homo sapiens
NFGSLLGACLILQITTGLFLAMHYSPDASTAFSSIAHITRDVNYG

SEQ ID NO: 1451 - protein, 34 aa, Homo sapiens
KLLDDNGNIAEELSILKWNTDSVEEFLSEKLERI

SEQ ID NO: 1452 - protein, 61 aa, Homo sapiens
  SITE (6): Xaa equals any of the naturally occurring L-amino acids
PRVRLXDETNICNGKPVDGLTTLRNGTLVAFRGHYFWMLSPFSPPSPARRITEVLGNPFPH

SEQ ID NO: 1453 - protein, 44 aa, Homo sapiens
REQKLELHRGAAALELVDPPGCRNSARGCSEPRSHHCTPVWATE

SEQ ID NO: 1454 - protein, 118 aa, Homo sapiens
  SITE (76): Xaa equals any of the naturally occurring L-amino acids
  SITE (84): Xaa equals any of the naturally occurring L-amino acids
  SITE (98): Xaa equals any of the naturally occurring L-amino acids
  SITE (99): Xaa equals any of the naturally occurring L-amino acids
  SITE (106): Xaa equals any of the naturally occurring L-amino acids
  SITE (111): Xaa equals any of the naturally occurring L-amino acids
TRVAPSVLRLAMTSYSYRQSSATSSFGGLGGGSVRIGPGVAFRAPSIHGGSGGRGVSVSSARFVSSSSSGGYGGGXGGVLTASXGLLAGNEKLTMQNXXTAWLLLXKFAPXGAKGTKS

SEQ ID NO: 1455 - protein, 48 aa, Homo sapiens
  SITE (2): Xaa equals any of the naturally occurring L-amino acids
  SITE (34): Xaa equals any of the naturally occurring L-amino acids
  SITE (43): Xaa equals any of the naturally occurring L-amino acids
AXENSRIVLQIDNARLAADDFRTKFETEQALRMXVEADINGLXRCWMS

SEQ ID NO: 1456 - protein, 143 aa, Homo sapiens
  SITE (131): Xaa equals any of the naturally occurring L-amino acids
  SITE (137): Xaa equals any of the naturally occurring L-amino acids
GDYSHYYTTIQDLRDKILGATIENSRIVLQIDNARLAADDFRTKFETEQALRMSVEADINGLRRVLDELTLARTDLEMQIEGLKEELAYLKKNHEEEISTLRGQVGGQVSVEVDSAPGTDLAKILSDMRSXYEVMAXQNRKDA

SEQ ID NO: 1457 - protein, 116 aa, Homo sapiens
  SITE (21): Xaa equals any of the naturally occurring L-amino acids
GCVGVRPSLHPATSTASGSAXPTLARAMASVSELACIYSALILHDDEVTVTEDKINALIKAAGVNVEPFWPGLFAKALANVNIGSLICNVGAGGPAPAAGAATSRRSCPLHCCCSS

SEQ ID NO: 1458 - protein, 115 aa, Homo sapiens
  SITE (47): Xaa equals any of the naturally occurring L-amino acids
LVPNSARAAASAADAAAMRYVASYLLAALGGNSSPSAKGIKKILDNXGIEADDDRLNKVISELNGKNIEDVIAQGIGKLASVPAGGAVAVSAAPGSAAPAAGSAPAAAEEKKDEK

SEQ ID NO: 1459 - protein, 132 aa, Homo sapiens
  SITE (115): Xaa equals any of the naturally occurring L-amino acids
  SITE (123): Xaa equals any of the naturally occurring L-amino acids
  SITE (126): Xaa equals any of the naturally occurring L-amino acids
  SITE (129): Xaa equals any of the naturally occurring L-amino acids
ASDALHSLSAPVLRLSSRSAARPATMTEQAISFAKDFLAGGIAAAISKTAVAPIERVKLLLQVQHASKQIAADKQYKGIVDCIVRIPKEQGVLSFWRGNLANVIRYFPTQALNFXFKDKYKQXFLXGVXKHT

SEQ ID NO: 1460 - protein, 124 aa, Homo sapiens
  SITE (1): Xaa equals any of the naturally occurring L-amino acids
  SITE (3): Xaa equals any of the naturally occurring L-amino acids
  SITE (8): Xaa equals any of the naturally occurring L-amino acids
  SITE (80): Xaa equals any of the naturally occurring L-amino acids
  SITE (85): Xaa equals any of the naturally occurring L-amino acids
  SITE (107): Xaa equals any of the naturally occurring L-amino acids
  SITE (112): Xaa equals any of the naturally occurring L-amino acids
  SITE (117): Xaa equals any of the naturally occurring L-amino acids
  SITE (119): Xaa equals any of the naturally occurring L-amino acids
  SITE (120): Xaa equals any of the naturally occurring L-amino acids
  SITE (121): Xaa equals any of the naturally occurring L-amino acids
XSXKTGFXDWISVAYYGCFREGATIIQVGKLIKEAAGKSNLKRVTLELGGKSPCIVLADADLDNAVEFAHHGVFYHQGQXCIAAXRIFVEESIYDEFVRRSVERVKXISLGXPLTPXVXXXPSD

SEQ ID NO: 1461 - protein, 179 aa, Homo sapiens
  SITE (102): Xaa equals any of the naturally occurring L-amino acids
  SITE (125): Xaa equals any of the naturally occurring L-amino acids
  SITE (142): Xaa equals any of the naturally occurring L-amino acids
  SITE (145): Xaa equals any of the naturally occurring L-amino acids
  SITE (157): Xaa equals any of the naturally occurring L-amino acids
  SITE (163): Xaa equals any of the naturally occurring L-amino acids
  SITE (173): Xaa equals any of the naturally occurring L-amino acids
  SITE (174): Xaa equals any of the naturally occurring L-amino acids
  SITE (176): Xaa equals any of the naturally occurring L-amino acids
WIPRAAGIRHEVVPLAGTNGETTTQGLDGLSERCAQYKKDGADFAKWRCVLKIGEHTPSALAIMENANVLARYASICQQNGIVPIVEPEILPDGDHDLKRLXVCDRKGAWLAATRLLSDHHIYLXGTLLKPNMVPQAMLALXSFXMKEIAHGEPVSXAVPAQXPPRLSLGINXXCXGRP

SEQ ID NO: 1462 - protein, 31 aa, Homo sapiens
  SITE (13): Xaa equals any of the naturally occurring L-amino acids
ANSLACQGKYTPXGQAGAAASESLFVSNHAY

SEQ ID NO: 1463 - protein, 71 aa, Homo sapiens
  SITE (65): Xaa equals any of the naturally occurring L-amino acids
  SITE (69): Xaa equals any of the naturally occurring L-amino acids
DDCEFKAEGNSKFTYTVLEDGCTKHTGEWSKTVFEYRTRKAVRLPIVDIAPYDIGGPDQEFGVDXGPVXFL

SEQ ID NO: 1464 - protein, 77 aa, Homo sapiens
  SITE (1): Xaa equals any of the naturally occurring L-amino acids
  SITE (6): Xaa equals any of the naturally occurring L-amino acids
  SITE (10): Xaa equals any of the naturally occurring L-amino acids
XGTRHXLRTXNQSSDELQLSMGNAMFVKEQLSLLDRFTEDAKRLYGSEAFATDFQDSAAAKKLINDYVKNGTRGTIT

SEQ ID NO: 1465 - protein, 105 aa, Homo sapiens
  SITE (83): Xaa equals any of the naturally occurring L-amino acids
  SITE (98): Xaa equals any of the naturally occurring L-amino acids
  SITE (103): Xaa equals any of the naturally occurring L-amino acids
  SITE (104): Xaa equals any of the naturally occurring L-amino acids
LKGRPGFPGSKGEAGFFGIPGLKGLAGEPGFKGSRGDPGPPGPPPVILPGMKDIKGEKGDEGPMGLKGYLGAKGIQGMPGIPXLSGIPGLPGRPGHIXGIKGXXG

SEQ ID NO: 1466 - protein, 36 aa, Homo sapiens
  SITE (19): Xaa equals any of the naturally occurring L-amino acids
RPGLCAKTVFKALQAPALXEEHGEGWRLHPWGVWET

SEQ ID NO: 1467 - protein, 82 aa, Homo sapiens
  SITE (76): Xaa equals any of the naturally occurring L-amino acids
  SITE (79): Xaa equals any of the naturally occurring L-amino acids
  SITE (80): Xaa equals any of the naturally occurring L-amino acids
  SITE (82): Xaa equals any of the naturally occurring L-amino acids
RVPAMAAKGGTVKAASAFNATEDAQTLRKAMKGLGTDEDAIISVLAYRNTAQRQEIRTALQEHHSAGDLVLRNGPXFVXXWX

SEQ ID NO: 1468 - protein, 83 aa, Homo sapiens
  SITE (15): Xaa equals any of the naturally occurring L-amino acids
  SITE (24): Xaa equals any of the naturally occurring L-amino acids
  SITE (35): Xaa equals any of the naturally occurring L-amino acids
  SITE (61): Xaa equals any of the naturally occurring L-amino acids
  SITE (66): Xaa equals any of the naturally occurring L-amino acids
  SITE (79): Xaa equals any of the naturally occurring L-amino acids
  SITE (82): Xaa equals any of the naturally occurring L-amino acids
  SITE (83): Xaa equals any of the naturally occurring L-amino acids
GWHLGPPGSWCWWSXCITGPNTSXCCWTHFEKPRXIDNVLVIFSHDFWSTEINQLIAGVNXCPVLXVFFPFSIQLFPNXFPXX

SEQ ID NO: 1469 - protein, 26 aa, Homo sapiens
EKDEYACRVNHVTLSQPKIVKWDRDM

SEQ ID NO: 1470 - protein, 168 aa, Homo sapiens
  SITE (17): Xaa equals any of the naturally occurring L-amino acids
  SITE (136): Xaa equals any of the naturally occurring L-amino acids
  SITE (139): Xaa equals any of the naturally occurring L-amino acids
  SITE (141): Xaa equals any of the naturally occurring L-amino acids
  SITE (143): Xaa equals any of the naturally occurring L-amino acids
  SITE (146): Xaa equals any of the naturally occurring L-amino acids
  SITE (148): Xaa equals any of the naturally occurring L-amino acids
  SITE (152): Xaa equals any of the naturally occurring L-amino acids
  SITE (153): Xaa equals any of the naturally occurring L-amino acids
  SITE (158): Xaa equals any of the naturally occurring L-amino acids
KKKKKKKKKKKKGGRSXGSKLTYACMRRHSSSIVSPKFNSLAVVLQRRDWENPGVTQLNRLAAHPPFASWRNSEEARTDRPSQQLRSLNGKWDAPCSGALSAAGVVVTRSVTATLASALRPVLSFLPFLSRHVRRXSPXSXKXGAXFXVPIXXLRDLXPKNLIRVMVT

SEQ ID NO: 1471 - protein, 131 aa, Homo sapiens
  SITE (22): Xaa equals any of the naturally occurring L-amino acids
  SITE (88): Xaa equals any of the naturally occurring L-amino acids
  SITE (111): Xaa equals any of the naturally occurring L-amino acids
  SITE (116): Xaa equals any of the naturally occurring L-amino acids
  SITE (119): Xaa equals any of the naturally occurring L-amino acids
CHLNSIHWPSFYNVVTGKTLAXPNLIALQHIPLSPAGSNSEEARTDRPSQQLRSLNGEWDAPCSGALSAAGVVVTRSVTATLASALAXAPFAFFPSFLATFAGFPRQALNXGLPLXFRXSAVRHLDPKKLD

SEQ ID NO: 1472 - protein, 179 aa, Homo sapiens
  SITE (5): Xaa equals any of the naturally occurring L-amino acids
  SITE (24): Xaa equals any of the naturally occurring L-amino acids
  SITE (25): Xaa equals any of the naturally occurring L-amino acids
  SITE (35): Xaa equals any of the naturally occurring L-amino acids
  SITE (40): Xaa equals any of the naturally occurring L-amino acids
  SITE (51): Xaa equals any of the naturally occurring L-amino acids
  SITE (71): Xaa equals any of the naturally occurring L-amino acids
  SITE (74): Xaa equals any of the naturally occurring L-amino acids
  SITE (82): Xaa equals any of the naturally occurring L-amino acids
  SITE (102): Xaa equals any of the naturally occurring L-amino acids
  SITE (105): Xaa equals any of the naturally occurring L-amino acids
  SITE (109): Xaa equals any of the naturally occurring L-amino acids
  SITE (110): Xaa equals any of the naturally occurring L-amino acids
  SITE (114): Xaa equals any of the naturally occurring L-amino acids
  SITE (117): Xaa equals any of the naturally occurring L-amino acids
  SITE (118): Xaa equals any of the naturally occurring L-amino acids
  SITE (119): Xaa equals any of the naturally occurring L-amino acids
  SITE (125): Xaa equals any of the naturally occurring L-amino acids
  SITE (139): Xaa equals any of the naturally occurring L-amino acids
  SITE (150): Xaa equals any of the naturally occurring L-amino acids
  SITE (161): Xaa equals any of the naturally occurring L-amino acids
  SITE (167): Xaa equals any of the naturally occurring L-amino acids
  SITE (179): Xaa equals any of the naturally occurring L-amino acids
KKKKXKKKKKKKKKKKKKKKGGRXXGSKLTYACMXRHSSXIGSPKFNSLAXVLQRRDWENPGVTQLNRLAXHPXFASWRNSXKARTDRPSQQLRSLNGKWDXPCXGALXXAGVXVTXXXTATLAXALAPAPFAFFPSFXATFAGFPRQAXNRGLPLGFRLXALRDLXPQKNLIRGDGSX

SEQ ID NO: 1473 - protein, 58 aa, Homo sapiens
IASGRSRGSKLTYACMRRHSSSIVSPKFNSLAVVLQRRDWENPGVTQLNRLAAHPPFA

SEQ ID NO: 1474 - protein, 70 aa, Homo sapiens
IASGRSRGSKLTYACMRRHSSSIVSPKFNSLAVVLQRRDWENPGVTQLNRLAAHPPFASWRNSEEARTDR

SEQ ID NO: 1475 - protein, 62 aa, Homo sapiens
  SITE (3): Xaa equals any of the naturally occurring L-amino acids
  SITE (5): Xaa equals any of the naturally occurring L-amino acids
  SITE (8): Xaa equals any of the naturally occurring L-amino acids
  SITE (9): Xaa equals any of the naturally occurring L-amino acids
  SITE (48): Xaa equals any of the naturally occurring L-amino acids
  SITE (59): Xaa equals any of the naturally occurring L-amino acids
  SITE (60): Xaa equals any of the naturally occurring L-amino acids
LPXAXYTXXGTTPHYRESWYACRYRSGIPGSTHASEKKKKKKKKKKRXDDLEDPKLTYXXMQ

SEQ ID NO: 1476 - protein, 80 aa, Homo sapiens
  SITE (3): Xaa equals any of the naturally occurring L-amino acids
  SITE (4): Xaa equals any of the naturally occurring L-amino acids
  SITE (5): Xaa equals any of the naturally occurring L-amino acids
  SITE (8): Xaa equals any of the naturally occurring L-amino acids
  SITE (29): Xaa equals any of the naturally occurring L-amino acids
  SITE (40): Xaa equals any of the naturally occurring L-amino acids
  SITE (44): Xaa equals any of the naturally occurring L-amino acids
  SITE (55): Xaa equals any of the naturally occurring L-amino acids
  SITE (73): Xaa equals any of the naturally occurring L-amino acids
IRXXXLRXDTTHYRESWYACRYRSGIPGXTHASVEICPPXSRPXSSQSNGEGYSXCRRPQALEAATYLNPVPXRILLKPF

SEQ ID NO: 1477 - protein, 52 aa, Homo sapiens
RQVPHERAVRDGRGGGRSRGSKLTYACMRRHSSSIVSPKFNSLAVVLQRRDW

SEQ ID NO: 1478 - protein, 154 aa, Homo sapiens
  SITE (140): Xaa equals any of the naturally occurring L-amino acids
IASGRSRGSKLTYACMRRHSSSIVSPKFNSLAVVLQRRDWENPGVTQLNRLAAHPPFASWRNSEEARTDRPSQQLRSLNGEWDAPCSGALSAAGVVVTRSVTATLASALAPAPFAFFPSFLATFAGFPRQALNRGLPLGXRFKCFTDLDPKKLD

SEQ ID NO: 1479 - protein, 130 aa, Homo sapiens
  SITE (122): Xaa equals any of the naturally occurring L-amino acids
IAGGRSRGSKLTYACMRRHSSSIVSPKFNSLAVVLQRRDWENPGVTQLNRLAAHPPFASWRNSEEARTDRPSQQLRSLNGEWDAPCSGALSAAGVVVTRSVTATLAKRPKRPFLSLSSFLFXPRSAGFSP

SEQ ID NO: 1480 - protein, 131 aa, Homo sapiens
  SITE (103): Xaa equals any of the naturally occurring L-amino acids
  SITE (112): Xaa equals any of the naturally occurring L-amino acids
  SITE (127): Xaa equals any of the naturally occurring L-amino acids
  SITE (129): Xaa equals any of the naturally occurring L-amino acids
IASGRSRGSKLTYACMRRHSSSIVSPKFNSLAVVLQRRDWENPGVTQLNRLAAHPPFASWRNSEEARTDRPSQQLRSLNGEWDAPCSGALSAAGVVVTRSVTXTLASALAPXPFAFFLLSRHGRPAXPXKL

SEQ ID NO: 1481 - protein, 112 aa, Homo sapiens
  SITE (1): Xaa equals any of the naturally occurring L-amino acids
  SITE (88): Xaa equals any of the naturally occurring L-amino acids
XSSRSRAARSRGSKLTYACMRRHSSSIVSPKFNSLAVVLQRRDWENPGVTQLNRLAAHPPFASWHNSEEARTDRPSQQLRSLNGEWDXPCSGALSAAGVVVTRSVTATLAAP

SEQ ID NO: 1482 - protein, 53 aa, Homo sapiens
  SITE (17): Xaa equals any of the naturally occurring L-amino acids
  SITE (26): Xaa equals any of the naturally occurring L-amino acids
  SITE (50): Xaa equals any of the naturally occurring L-amino acids
ENVKAKIQDKEGIPPEXSRELNLCLXKQLGRMGRYFVLNLQYFKRGSYFXILC

SEQ ID NO: 1483 - protein, 61 aa, Homo sapiens
  SITE (56): Xaa equals any of the naturally occurring L-amino acids
  SITE (59): Xaa equals any of the naturally occurring L-amino acids
ANMQIFVKTLTGKTITLEVEPSDTIENVKAKIQDKEGIPPDQQRLIFAGKQLEGWXQLXQT

SEQ ID NO: 1484 - protein, 27 aa, Homo sapiens
  SITE (6): Xaa equals any of the naturally occurring L-amino acids
  SITE (13): Xaa equals any of the naturally occurring L-amino acids
  SITE (20): Xaa equals any of the naturally occurring L-amino acids
  SITE (22): Xaa equals any of the naturally occurring L-amino acids
  SITE (23): Xaa equals any of the naturally occurring L-amino acids
GEGPTXPLPSETXGDVAPLXCXXGLNM

SEQ ID NO: 1485 - protein, 45 aa, Homo sapiens
  SITE (12): Xaa equals any of the naturally occurring L-amino acids
  SITE (24): Xaa equals any of the naturally occurring L-amino acids
  SITE (30): Xaa equals any of the naturally occurring L-amino acids
  SITE (34): Xaa equals any of the naturally occurring L-amino acids
FLAAGNPLRWPXILTSRWKSDIYXRKSDGXYIIXLKRTWEKLLLG

SEQ ID NO: 1486 - protein, 140 aa, Homo sapiens
PRVRRAEWLCGRVSETGSACSMADQLTEEQIAEFKEAFSLFDKDGDGTITTKELGTVMRSLGQNPTEAELQDMINEVDADGNGTIDFPEFLTMMARKMKDTDSEEEIREAFRVFDKDGNGYISAAELRHVMTNLGREVNR

SEQ ID NO: 1487 - protein, 36 aa, Homo sapiens
  SITE (1): Xaa equals any of the naturally occurring L-amino acids
  SITE (8): Xaa equals any of the naturally occurring L-amino acids
  SITE (13): Xaa equals any of the naturally occurring L-amino acids
  SITE (16): Xaa equals any of the naturally occurring L-amino acids
  SITE (19): Xaa equals any of the naturally occurring L-amino acids
  SITE (35): Xaa equals any of the naturally occurring L-amino acids
XLGRNWAXFTGKXVGXASXNVYVHIPHLRNSHEKXS

SEQ ID NO: 1488 - protein, 34 aa, Homo sapiens
SGPLWILGDVFIGRYYTVFDRDNNRVGFAEAARL

SEQ ID NO: 1489 - protein, 160 aa, Homo sapiens
  SITE (4): Xaa equals any of the naturally occurring L-amino acids
  SITE (5): Xaa equals any of the naturally occurring L-amino acids
  SITE (8): Xaa equals any of the naturally occurring L-amino acids
  SITE (160): Xaa equals any of the naturally occurring L-amino acids
PTNXXKSXELHRGGGRSRTSGSPGLQEFGTSTQRPVDIVFLLDGSERLGEQNFHKARRFVEQVARRLTLARRDDDPLNARVALLQFGGPGEQQVAFPLSHNLTAIHEALETTQYLNSFSHVGAGVVHAINAIVRSPRGGARRHAELPSWSSRTASRATTX

SEQ ID NO: 1490 - protein, 105 aa, Homo sapiens
  SITE (27): Xaa equals any of the naturally occurring L-amino acids
  SITE (40): Xaa equals any of the naturally occurring L-amino acids
  SITE (42): Xaa equals any of the naturally occurring L-amino acids
  SITE (49): Xaa equals any of the naturally occurring L-amino acids
  SITE (58): Xaa equals any of the naturally occurring L-amino acids
  SITE (59): Xaa equals any of the naturally occurring L-amino acids
  SITE (62): Xaa equals any of the naturally occurring L-amino acids
  SITE (65): Xaa equals any of the naturally occurring L-amino acids
  SITE (82): Xaa equals any of the naturally occurring L-amino acids
  SITE (86): Xaa equals any of the naturally occurring L-amino acids
  SITE (99): Xaa equals any of the naturally occurring L-amino acids
  SITE (101): Xaa equals any of the naturally occurring L-amino acids
AQMGMLKGPLLNKFLTTAKDKNRWEDXGKQLYNVEATSYXLXALLQLKXFDFVPPVVXXLNXQRXYGGGYGSTQATFMVFQXLAQXQKDGPDHQALNLXVXLQML

SEQ ID NO: 1491 - protein, 125 aa, Homo sapiens
RNTLIIYLDKVSHSEDDCLAFKVHQYFNVELIQPGAVKVYAYYNLEESCTRFYHPEKEDGKLNKLCRDELCRCAEENCFIQKSDDKVTLEERLDKACEPGVDYVYKTRLARFKLSNDFDRVHHGH

SEQ ID NO: 1492 - protein, 68 aa, Homo sapiens
  SITE (62): Xaa equals any of the naturally occurring L-amino acids
RPTRPALSIIALEIQAQKCVELTEGIECLQTHSKINGRDLTFWQELVSKCLTEYSSKQSGSXPNVPEV

SEQ ID NO: 1493 - protein, 74 aa, Homo sapiens
  SITE (14): Xaa equals any of the naturally occurring L-amino acids
  SITE (17): Xaa equals any of the naturally occurring L-amino acids
  SITE (29): Xaa equals any of the naturally occurring L-amino acids
  SITE (52): Xaa equals any of the naturally occurring L-amino acids
  SITE (55): Xaa equals any of the naturally occurring L-amino acids
  SITE (62): Xaa equals any of the naturally occurring L-amino acids
  SITE (63): Xaa equals any of the naturally occurring L-amino acids
  SITE (74): Xaa equals any of the naturally occurring L-amino acids
EEIQKHNHSKSTWXDPXTTRCTNLTKFLXEASLVGEEVLRGTSLEVTLLEEXLRXVRGTFTXXPKGKLFPKTFX

SEQ ID NO: 1494 - protein, 54 aa, Homo sapiens
  SITE (46): Xaa equals any of the naturally occurring L-amino acids
  SITE (49): Xaa equals any of the naturally occurring L-amino acids
DATSPIIEELITFHDHALIIIFLICFLVLYALFLTLTTKLTNTNIXDAXEIETV

SEQ ID NO: 1495 - protein, 38 aa, Homo sapiens
FFGHPEVYILILPGFGIISHIVTYYSGKKEPFGYIGMV

SEQ ID NO: 1496 - protein, 46 aa, Homo sapiens
AFYHSSLAPTPQLGGHWPPTGITPLNPLEVPLLNTSVLLASGVSIT

SEQ ID NO: 1497 - protein, 60 aa, Homo sapiens
AQVGLQDATSPIIEELITFHDHALIIIFLICFLVLYALFLTLTTKLTNTNISDAQEIETV

SEQ ID NO: 1498 - protein, 45 aa, Homo sapiens
TYEYTDYGGLIFNSYILPPLFLEPGDLRLLDGDNRVVLPIEAPFV

SEQ ID NO: 1499 - protein, 69 aa, Homo sapiens
  SITE (63): Xaa equals any of the naturally occurring L-amino acids
HRLDFLQLMIDSQNSKETESHKALSDLELAAQSIIFIFAGYETTSSVLSFTLYELATHPDVQXKLQKGD

SEQ ID NO: 1500 - protein, 35 aa, Homo sapiens
  SITE (19): Xaa equals any of the naturally occurring L-amino acids
  SITE (23): Xaa equals any of the naturally occurring L-amino acids
  SITE (31): Xaa equals any of the naturally occurring L-amino acids
RLTSTACAESWDELTLARXDLEXQIEGLNEXASLT

SEQ ID NO: 1501 - protein, 126 aa, Homo sapiens
  SITE (2): Xaa equals any of the naturally occurring L-amino acids
  SITE (11): Xaa equals any of the naturally occurring L-amino acids
  SITE (33): Xaa equals any of the naturally occurring L-amino acids
  SITE (49): Xaa equals any of the naturally occurring L-amino acids
  SITE (56): Xaa equals any of the naturally occurring L-amino acids
  SITE (58): Xaa equals any of the naturally occurring L-amino acids
  SITE (67): Xaa equals any of the naturally occurring L-amino acids
  SITE (68): Xaa equals any of the naturally occurring L-amino acids
  SITE (76): Xaa equals any of the naturally occurring L-amino acids
  SITE (80): Xaa equals any of the naturally occurring L-amino acids
  SITE (82): Xaa equals any of the naturally occurring L-amino acids
  SITE (95): Xaa equals any of the naturally occurring L-amino acids
  SITE (98): Xaa equals any of the naturally occurring L-amino acids
  SITE (117): Xaa equals any of the naturally occurring L-amino acids
FXAPSRISAWXGPPASTPASTMSIKVTQKSYKXSTSSPRAFSSRSYTNXPGSRINXSXFSRIGSSNXXSGLGGGYXGASXMXGITAVTVNQSLLXPLXLEVDPNIQAVRTQEKEQIXTLNNKFASS

SEQ ID NO: 1502 - protein, 84 aa, Homo sapiens
  SITE (5): Xaa equals any of the naturally occurring L-amino acids
  SITE (10): Xaa equals any of the naturally occurring L-amino acids
  SITE (11): Xaa equals any of the naturally occurring L-amino acids
  SITE (14): Xaa equals any of the naturally occurring L-amino acids
  SITE (15): Xaa equals any of the naturally occurring L-amino acids
  SITE (18): Xaa equals any of the naturally occurring L-amino acids
  SITE (27): Xaa equals any of the naturally occurring L-amino acids
  SITE (30): Xaa equals any of the naturally occurring L-amino acids
  SITE (44): Xaa equals any of the naturally occurring L-amino acids
  SITE (48): Xaa equals any of the naturally occurring L-amino acids
  SITE (63): Xaa equals any of the naturally occurring L-amino acids
  SITE (67): Xaa equals any of the naturally occurring L-amino acids
  SITE (72): Xaa equals any of the naturally occurring L-amino acids
  SITE (76): Xaa equals any of the naturally occurring L-amino acids
  SITE (81): Xaa equals any of the naturally occurring L-amino acids
QRNSXGSRTXXSRXXCKXVAMFSWDPXLVXGGGASKMAVAHALXEKSXAMDWCGNNGHTGLLXRALXVHSSXPWIXKLWGXSHH

SEQ ID NO: 1503 - protein, 70 aa, Homo sapiens
  SITE (69): Xaa equals any of the naturally occurring L-amino acids
  SITE (70): Xaa equals any of the naturally occurring L-amino acids
VGVLGLDLWQVKSGTIFDNFLITNDEAYAEEFGNETWGVTKAAEKQMKDKQDEEQRLKEEEEDKKRKEXX

SEQ ID NO: 1504 - protein, 42 aa, Homo sapiens
  SITE (4): Xaa equals any of the naturally occurring L-amino acids
  SITE (6): Xaa equals any of the naturally occurring L-amino acids
  SITE (11): Xaa equals any of the naturally occurring L-amino acids
  SITE (16): Xaa equals any of the naturally occurring L-amino acids
  SITE (41): Xaa equals any of the naturally occurring L-amino acids
NTLXYXMKATXILLLXAQLSWAGPFHQTGLLDSMLEHEAYXI

SEQ ID NO: 1505 - protein, 72 aa, Homo sapiens
  SITE (1): Xaa equals any of the naturally occurring L-amino acids
  SITE (3): Xaa equals any of the naturally occurring L-amino acids
  SITE (7): Xaa equals any of the naturally occurring L-amino acids
  SITE (46): Xaa equals any of the naturally occurring L-amino acids
  SITE (65): Xaa equals any of the naturally occurring L-amino acids
  SITE (72): Xaa equals any of the naturally occurring L-amino acids
XHXDCSXPIVAAGVGEFEAGISKNGQTREHALLAYTLGVKQLIVGXNKMDSTEPPYSQKRYEEIXKEVSTYX

SEQ ID NO: 1506 - protein, 23 aa, Homo sapiens
AETRKRKGLKEGIPALDNFLDKL

SEQ ID NO: 1507 - protein, 87 aa, Homo sapiens
  SITE (79): Xaa equals any of the naturally occurring L-amino acids
KLPLKAKMGKEKTHINIVVIGHVDSGKSTTTGHLIYKCGGIDKRTIEKFEKEAAEMGKGSFKYAWVLDKLKAERERGIXIGYLLVEI

SEQ ID NO: 1508 - protein, 110 aa, Homo sapiens
  SITE (4): Xaa equals any of the naturally occurring L-amino acids
  SITE (74): Xaa equals any of the naturally occurring L-amino acids
  SITE (96): Xaa equals any of the naturally occurring L-amino acids
  SITE (99): Xaa equals any of the naturally occurring L-amino acids
  SITE (108): Xaa equals any of the naturally occurring L-amino acids
PDPXIFAPPISAPPPSSGTRDRSQRSLDHYEPPVQPRGPCPRSFELLVRAVGAAAAADAARAHRQRWSCRCCVXRAALPFVYRPRKESIPKMISNXQVXAIGPTVLQXGK

SEQ ID NO: 1509 - protein, 60 aa, Homo sapiens
  SITE (18): Xaa equals any of the naturally occurring L-amino acids
  SITE (27): Xaa equals any of the naturally occurring L-amino acids
  SITE (31): Xaa equals any of the naturally occurring L-amino acids
  SITE (41): Xaa equals any of the naturally occurring L-amino acids
  SITE (43): Xaa equals any of the naturally occurring L-amino acids
  SITE (47): Xaa equals any of the naturally occurring L-amino acids
  SITE (49): Xaa equals any of the naturally occurring L-amino acids
SFVELPLASIVSLHASSXGGRLQTSPXPIQXTPPKDTCSPXLXMSLXPXKLCRRRHGPWY

SEQ ID NO: 1510 - protein, 116 aa, Homo sapiens
  SITE (91): Xaa equals any of the naturally occurring L-amino acids
  SITE (92): Xaa equals any of the naturally occurring L-amino acids
  SITE (108): Xaa equals any of the naturally occurring L-amino acids
  SITE (115): Xaa equals any of the naturally occurring L-amino acids
GTSSSQRFYKENLGQGWMTQKHERMKVYVPTGFSAFPFELLHTPEKWVRFKYPKLISYSYMVRGGHFAAFEEPELLAQDIRKFLSVLERHXXTPLPPLATSPHNALQXFLGEDNXF

SEQ ID NO: 1511 - protein, 156 aa, Homo sapiens
  SITE (11): Xaa equals any of the naturally occurring L-amino acids
  SITE (104): Xaa equals any of the naturally occurring L-amino acids
  SITE (143): Xaa equals any of the naturally occurring L-amino acids
REQKLELHRGXGRSRTSGSPGLQEFGTRDRGGFPPRGPRGSRGNPSGGGNVQHRAGDWQCPNPSIGDFCCDVIVCRGCGNQNFAWRTECNQCGDRGRGGPGGMXGGRGGLMDRGGPGGMFRGGRGGDRGGFRGGRGMDRGGFXGGRRGGPGGPLDL

SEQ ID NO: 1512 - protein, 102 aa, Homo sapiens
  SITE (41): Xaa equals any of the naturally occurring L-amino acids
  SITE (52): Xaa equals any of the naturally occurring L-amino acids
  SITE (58): Xaa equals any of the naturally occurring L-amino acids
  SITE (64): Xaa equals any of the naturally occurring L-amino acids
  SITE (89): Xaa equals any of the naturally occurring L-amino acids
  SITE (101): Xaa equals any of the naturally occurring L-amino acids
PMRRPRGEPAPGPRDRLRERPAQGPGSHVRVAPLATVNILXSLCQLRCLPFXALHFVXSPGFIXYISGTPHALIVRRYLSLLDTAVELXLPRYRGPRLPRXQ

SEQ ID NO: 1513 - protein, 139 aa, Homo sapiens
  SITE (131): Xaa equals any of the naturally occurring L-amino acids
ETERGFEELPLCSCRMEAPKIDSISERAGHKCMATESVDGELSGCNAAILKRETMRPSSRVALMVLCETHRARMVKHHCCPGCGYFCTAGTFLECHPDFRVAHRFHKACVSQLNGMVFCPHCGEDTSEAQXVTIPGVTG

SEQ ID NO: 1514 - protein, 72 aa, Homo sapiens
  SITE (11): Xaa equals any of the naturally occurring L-amino acids
  SITE (19): Xaa equals any of the naturally occurring L-amino acids
  SITE (23): Xaa equals any of the naturally occurring L-amino acids
  SITE (25): Xaa equals any of the naturally occurring L-amino acids
  SITE (30): Xaa equals any of the naturally occurring L-amino acids
  SITE (37): Xaa equals any of the naturally occurring L-amino acids
  SITE (41): Xaa equals any of the naturally occurring L-amino acids
  SITE (49): Xaa equals any of the naturally occurring L-amino acids
  SITE (53): Xaa equals any of the naturally occurring L-amino acids
  SITE (54): Xaa equals any of the naturally occurring L-amino acids
  SITE (60): Xaa equals any of the naturally occurring L-amino acids
  SITE (68): Xaa equals any of the naturally occurring L-amino acids
  SITE (70): Xaa equals any of the naturally occurring L-amino acids
IRHESISGASXKDIVHSGXAYTXEXSARQXMRTAMKXNLGXDLRTASYXNAIXXVFKVYXEAGVTFTXMXHG

SEQ ID NO: 1515 - protein, 88 aa, Homo sapiens
  SITE (82): Xaa equals any of the naturally occurring L-amino acids
  SITE (85): Xaa equals any of the naturally occurring L-amino acids
LYPPACSATRTPSTMTTSASSHLNKGIKQVYMSLPQGEKVQAMYIWIDGTGEGLRCKTRTLDSEPKCVEELPEWNFDGSSTXQSXGSS

SEQ ID NO: 1516 - protein, 105 aa, Homo sapiens
  SITE (8): Xaa equals any of the naturally occurring L-amino acids
  SITE (10): Xaa equals any of the naturally occurring L-amino acids
  SITE (11): Xaa equals any of the naturally occurring L-amino acids
  SITE (27): Xaa equals any of the naturally occurring L-amino acids
  SITE (38): Xaa equals any of the naturally occurring L-amino acids
  SITE (87): Xaa equals any of the naturally occurring L-amino acids
  SITE (89): Xaa equals any of the naturally occurring L-amino acids
  SITE (94): Xaa equals any of the naturally occurring L-amino acids
  SITE (103): Xaa equals any of the naturally occurring L-amino acids
GRESQDTXFXXLVERVIQQLEGAFALXFKSVHFPGQAXGTRRGSPLLIGVRSEHKLSTDHIPILYRTGKDKKGSCNLSRVDSTTCLXPXEEKAXEYYFASDAXAA

SEQ ID NO: 1517 - protein, 121 aa, Homo sapiens
  SITE (2): Xaa equals any of the naturally occurring L-amino acids
  SITE (17): Xaa equals any of the naturally occurring L-amino acids
  SITE (19): Xaa equals any of the naturally occurring L-amino acids
  SITE (22): Xaa equals any of the naturally occurring L-amino acids
  SITE (33): Xaa equals any of the naturally occurring L-amino acids
  SITE (71): Xaa equals any of the naturally occurring L-amino acids
  SITE (72): Xaa equals any of the naturally occurring L-amino acids
  SITE (100): Xaa equals any of the naturally occurring L-amino acids
  SITE (106): Xaa equals any of the naturally occurring L-amino acids
  SITE (109): Xaa equals any of the naturally occurring L-amino acids
  SITE (110): Xaa equals any of the naturally occurring L-amino acids
GXEKRERERERLVIRQXPXVQXLQAYKPRENDXLALEKADVVMVTHQSSARLAGGREALRRGARLVSCDSXXSSFPTQRSVTQNLKGSFIECKTCQTTAXGNSKPXFSXXEGVFVSWKNKL

SEQ ID NO: 1518 - protein, 146 aa, Homo sapiens
  SITE (71): Xaa equals any of the naturally occurring L-amino acids
  SITE (118): Xaa equals any of the naturally occurring L-amino acids
  SITE (132): Xaa equals any of the naturally occurring L-amino acids
  SITE (135): Xaa equals any of the naturally occurring L-amino acids
  SITE (138): Xaa equals any of the naturally occurring L-amino acids
RGPAQRGEGAREANKKIEKQLQKDKQVYRATHRLLLLGAGESGKSTIVKQMRILHVNGFNGDSEKATKVQXIKNNLKEAIETIVAAMSNLVPPVELANPENQFRVDYILSVMNVPDFXFPPEFYEHAKALWXDEXVRXCYERSNEY

SEQ ID NO: 1519 - protein, 137 aa, Homo sapiens
  SITE (72): Xaa equals any of the naturally occurring L-amino acids
DSQRQATKDAGVIAGLNVLRIINEPTAAAIAYGLDRTGKGERNVLIFDLGGGTFDVSILTIDDGIFEVKATXGDTHLGGEDFDNRLVNHFVEEFKRKHKKDISQNKRAVRRLRTAARGPRGPCRPAPRPAWRSTSLF

SEQ ID NO: 1520 - protein, 100 aa, Homo sapiens
  SITE (16): Xaa equals any of the naturally occurring L-amino acids
  SITE (19): Xaa equals any of the naturally occurring L-amino acids
  SITE (45): Xaa equals any of the naturally occurring L-amino acids
  SITE (99): Xaa equals any of the naturally occurring L-amino acids
CRKSSWKRWWPQSKLXTRXIVTIGIKAMATMDITAKVTVVMEDMXYTGYNNYYGYGDYSNQQSGYGKVSRRGGHQNSYKPYLNYSICNLSPTGGEAYFXI

SEQ ID NO: 1521 - protein, 129 aa, Homo sapiens
  SITE (72): Xaa equals any of the naturally occurring L-amino acids
  SITE (95): Xaa equals any of the naturally occurring L-amino acids
  SITE (110): Xaa equals any of the naturally occurring L-amino acids
  SITE (111): Xaa equals any of the naturally occurring L-amino acids
  SITE (123): Xaa equals any of the naturally occurring L-amino acids
DAWALAPGPVLFSNMVCLKFPGSSCMAALTVTLMVLNSPLALAGDTRPRFLEQVKHECHFFNGTERVRFLDXYFYHQEEYVRFDSDVGEYRAVTXLGRPNSEYWNSQKDXXDRSGPRWTPTAXTLRGWV

SEQ ID NO: 1522 - protein, 113 aa, Homo sapiens
  SITE (1): Xaa equals any of the naturally occurring L-amino acids
  SITE (2): Xaa equals any of the naturally occurring L-amino acids
  SITE (6): Xaa equals any of the naturally occurring L-amino acids
  SITE (40): Xaa equals any of the naturally occurring L-amino acids
  SITE (44): Xaa equals any of the naturally occurring L-amino acids
  SITE (53): Xaa equals any of the naturally occurring L-amino acids
  SITE (58): Xaa equals any of the naturally occurring L-amino acids
  SITE (65): Xaa equals any of the naturally occurring L-amino acids
  SITE (67): Xaa equals any of the naturally occurring L-amino acids
  SITE (74): Xaa equals any of the naturally occurring L-amino acids
  SITE (80): Xaa equals any of the naturally occurring L-amino acids
  SITE (90): Xaa equals any of the naturally occurring L-amino acids
  SITE (93): Xaa equals any of the naturally occurring L-amino acids
  SITE (97): Xaa equals any of the naturally occurring L-amino acids
  SITE (110): Xaa equals any of the naturally occurring L-amino acids
XXTDSXRPDSRVDPRVREVTDYAIARRIVDLHSRIEESIXNIYXLDDIRRYLXYARKXKPKNSKXSXDFIVEQXKHLRPXDGFWSSPVFXEGXSCGXIEGLGSVSLGSQXLRV

SEQ ID NO: 1523 - protein, 32 aa, Homo sapiens
  SITE (16): Xaa equals any of the naturally occurring L-amino acids
  SITE (31): Xaa equals any of the naturally occurring L-amino acids
PCKGSIITWSLIRDLXEWLHEGQLALTFNQXN

SEQ ID NO: 1524 - protein, 28 aa, Homo sapiens
PCKGSIITCSLNRDLYEWLHEGSAVSYF

SEQ ID NO: 1525 - protein, 92 aa, Homo sapiens
  SITE (1): Xaa equals any of the naturally occurring L-amino acids
  SITE (6): Xaa equals any of the naturally occurring L-amino acids
  SITE (21): Xaa equals any of the naturally occurring L-amino acids
  SITE (23): Xaa equals any of the naturally occurring L-amino acids
  SITE (71): Xaa equals any of the naturally occurring L-amino acids
  SITE (75): Xaa equals any of the naturally occurring L-amino acids
  SITE (76): Xaa equals any of the naturally occurring L-amino acids
  SITE (80): Xaa equals any of the naturally occurring L-amino acids
  SITE (92): Xaa equals any of the naturally occurring L-amino acids
XEQKLXLHRGGGRSRTSGSPXLXEFGTSGTRPCGVYTPRCGSGLLCYPPRGVEKPLHTLMHGQGVCMELAXIEAXXESLXPSDKDEGDHPNX

SEQ ID NO: 1526 - protein, 154 aa, Homo sapiens
  SITE (1): Xaa equals any of the naturally occurring L-amino acids
  SITE (118): Xaa equals any of the naturally occurring L-amino acids
XEPSPGIFRWFHLVNRTEQRELTMEFGLSWLFLVAILKGVQCEVQLVESGGGLVQPGGSLRLSCTVSGFTFRNYAMSWVRQGPGKGLEWVSAIDGSGYNTYYERSLQGRFSVSRDNSXNTLYLQMNSLGAEDTAIYYCAKTERMGTGWYGRNDY

SEQ ID NO: 1527 - protein, 135 aa, Homo sapiens
  SITE (95): Xaa equals any of the naturally occurring L-amino acids
  SITE (129): Xaa equals any of the naturally occurring L-amino acids
  SITE (133): Xaa equals any of the naturally occurring L-amino acids
  SITE (134): Xaa equals any of the naturally occurring L-amino acids
GKLVRLQVPVRNSRVDPRVRTVTPGETASISCRSSQTLLHVNGHNYLDWYMQKPGQPPQLVVYRGSNRASGVPDRFSGGGSGTDFTLRITTVEAXDVGVYYCMQALQSPYTFGQGTKLEIKRTVGCTIXLHLXXI

SEQ ID NO: 1528 - protein, 139 aa, Homo sapiens
  SITE (117): Xaa equals any of the naturally occurring L-amino acids
  SITE (137): Xaa equals any of the naturally occurring L-amino acids
REQKLELHRGGGRSRTSGSPGLQEFGTSGWALRISRFLPGFHSFAPCTVAPSLRAQPAKQRAPVAGVMQRARPTLWAAALTLLVLLRGPPVARAGASSGGLGPVVRCEPCDARALAXCAPSARRVRRNLVRQAGLAXAA

SEQ ID NO: 1529 - protein, 135 aa, Homo sapiens
WIPRAAGIRHEIDDTNITRLQLETEIEALKEELLFMKKNHEEEVKGLQAQIASSGLTVEVDAPKSQDLAKIMADIRAQYDELARKNREELDKYWSQQIEESTTVVTTQSAEVGAAETTLTELRRTVQSLEIDLGL

SEQ ID NO: 1530 - protein, 132 aa, Homo sapiens
WIPRAAGIRHEQVPARKKRPKRLRTGNMVRSGNKAAVVLCMDVGFTMSNSIPGIESPFEQAKKVITMFVQRQVFAENKDEIALVLFGTDGTDNPLSGGDQYQNITVHRHLMLPDFDLLEDIEKQNPTRFSTG

SEQ ID NO: 1531 - protein, 94 aa, Homo sapiens
  SITE (18): Xaa equals any of the naturally occurring L-amino acids
  SITE (27): Xaa equals any of the naturally occurring L-amino acids
  SITE (34): Xaa equals any of the naturally occurring L-amino acids
  SITE (61): Xaa equals any of the naturally occurring L-amino acids
  SITE (69): Xaa equals any of the naturally occurring L-amino acids
  SITE (75): Xaa equals any of the naturally occurring L-amino acids
  SITE (78): Xaa equals any of the naturally occurring L-amino acids
  SITE (94): Xaa equals any of the naturally occurring L-amino acids
RKRLKGEEQKLLRNARRXQKMACQMTXNHSSVSXLKGSSLQDRRASRFLIKSVQKSSGVQXDPSSSISXPSLTAXWSXLPWHLRGPKAAKTLKX

SEQ ID NO: 1532 - protein, 153 aa, Homo sapiens
QTTMCYGKCARCIGHSLVGLALLCIAANILLYFPNGETKYASENHLSRFVWFFSGIVGGGLLMLLPAFVFIGLEQDDCCGCCGHENCGKRCAMLSSVLAALIGIAGSGYCVIVAALGLAEGPLCLDSLGQWNYTFASTEGQVPSGYLHMVRVH

SEQ ID NO: 1533 - protein, 142 aa, Homo sapiens
LCLLRTTVTEVSRAFSLLCKMATLKEKLIAPVAEEEATVPNNKITVVGVGQVGMACAISILGKSLADELALVDVLEDKLKGEMMDLQHGSLFLQTPKILADKDYSVTANSKIVVVTAGVRQQEGESRLNLVQRNVNVFKFII

SEQ ID NO: 1534 - protein, 67 aa, Homo sapiens
  SITE (42): Xaa equals any of the naturally occurring L-amino acids
  SITE (48): Xaa equals any of the naturally occurring L-amino acids
  SITE (54): Xaa equals any of the naturally occurring L-amino acids
  SITE (61): Xaa equals any of the naturally occurring L-amino acids
AHCHAPPTTARRAFPIPFGSKSNMATLKDQLIYNLLKEEQTXQNKITXVGVGAXGMACAIXILMKDL

SEQ ID NO: 1535 - protein, 72 aa, Homo sapiens
  SITE (1): Xaa equals any of the naturally occurring L-amino acids
  SITE (8): Xaa equals any of the naturally occurring L-amino acids
XKKYLGDXIEGTPAGTGPEFPGLLTCLLQLIMVTNKAIASQISQIKHFFHCILVVVCPNSSMYLIMSGSILH

SEQ ID NO: 1536 - protein, 80 aa, Homo sapiens
  SITE (20): Xaa equals any of the naturally occurring L-amino acids
  SITE (45): Xaa equals any of the naturally occurring L-amino acids
  SITE (50): Xaa equals any of the naturally occurring L-amino acids
  SITE (58): Xaa equals any of the naturally occurring L-amino acids
  SITE (68): Xaa equals any of the naturally occurring L-amino acids
GKAWGSECEKCPLPGTEAFXEICPAGHGYTYASSDIRLSMRKAEXEELAXPPREQGQXSSWALPGPTXKQPLRVRHGHLA

SEQ ID NO: 1537 - protein, 137 aa, Homo sapiens
  SITE (58): Xaa equals any of the naturally occurring L-amino acids
  SITE (74): Xaa equals any of the naturally occurring L-amino acids
  SITE (122): Xaa equals any of the naturally occurring L-amino acids
  SITE (134): Xaa equals any of the naturally occurring L-amino acids
  SITE (136): Xaa equals any of the naturally occurring L-amino acids
  SITE (137): Xaa equals any of the naturally occurring L-amino acids
RKQCQDSKDSNHLPKMSLSAFTLFLALIGGTSGQYYDYDFPLSIYGQSSPNCAPECNXPESYPSAMYCDELKLXSVPMVPPGIKYLYLRNNQIDHIDEKAFENVTDLQWLILDHNLLENSKXKGRVFSKLKQLXKXX

SEQ ID NO: 1538 - protein, 144 aa, Homo sapiens
  SITE (134): Xaa equals any of the naturally occurring L-amino acids
  SITE (137): Xaa equals any of the naturally occurring L-amino acids
YQVYSKIQATNTWLFLSSCNGNETSLWDCKNWQWGGLTCDHYEEAKITCSAHREPRLVGGDIPCSGRVEVKHGDTWGSICDSDFSLEAASVLCRELQCGTVVSILGGAHFGEGMDRSGLKNSSVEGHESPSFIXPVXTPPKRNL

SEQ ID NO: 1539 - protein, 85 aa, Homo sapiens
  SITE (35): Xaa equals any of the naturally occurring L-amino acids
NMAGVEEVAASGSHLNGDLDPDDREEGAASTAEEXAKKKRRKKKKSKGPSAGKESFMFSQSPPGTAELFGSGPLRGPGPGPQSPD

SEQ ID NO: 1540 - protein, 36 aa, Homo sapiens
  SITE (9): Xaa equals any of the naturally occurring L-amino acids
  SITE (18): Xaa equals any of the naturally occurring L-amino acids
  SITE (22): Xaa equals any of the naturally occurring L-amino acids
  SITE (27): Xaa equals any of the naturally occurring L-amino acids
GVGFREGTXGAQTQRIRXRVPXNWKMXFEPISSTKF

SEQ ID NO: 1541 - protein, 144 aa, Homo sapiens
  SITE (3): Xaa equals any of the naturally occurring L-amino acids
  SITE (5): Xaa equals any of the naturally occurring L-amino acids
  SITE (19): Xaa equals any of the naturally occurring L-amino acids
  SITE (21): Xaa equals any of the naturally occurring L-amino acids
  SITE (107): Xaa equals any of the naturally occurring L-amino acids
  SITE (123): Xaa equals any of the naturally occurring L-amino acids
  SITE (131): Xaa equals any of the naturally occurring L-amino acids
  SITE (132): Xaa equals any of the naturally occurring L-amino acids
  SITE (143): Xaa equals any of the naturally occurring L-amino acids
RTXAXGERACRSTLVDPKXVXTVFSLGACMEGLNILLNRLLGISLYAEQPAKGEVWSEDVRKLAVVHESEGLLGYIYCDFFQRADKPHQDCHFTIRGGRLKGRWETXQLPVVSSYAGIFPVPXREFSNFGXXLGMMGKPFPGXG

SEQ ID NO: 1542 - protein, 145 aa, Homo sapiens
  SITE (40): Xaa equals any of the naturally occurring L-amino acids
AERTPCRRPAEMLRLPTVFRQMRPVSRVLAPHLTRAYAKXVKFGADARALMLQGVDLLADAVAVTMGPKGRTVIIEQSWGSPKVTKDGVTVAKSIDLKDKYKNIGAKLVQDVANNTNEEAGDGTTTATVLARSIAKEGFEKISKG

SEQ ID NO: 1543 - protein, 135 aa, Homo sapiens
KFGADARALMLQGVDLLADAVAVTMGPKGRTVIIEQSWGSPKVTKDGVTVAKSIDLKDKYKNIGAKLVQDVANNTNEEAGDGTTTATVLARSIAKEGFEKISKGANPVEIRRGVMLAVDAVIAELKKQSKPVTTP

SEQ ID NO: 1544 - protein, 84 aa, Homo sapiens
  SITE (68): Xaa equals any of the naturally occurring L-amino acids
  SITE (72): Xaa equals any of the naturally occurring L-amino acids
  SITE (77): Xaa equals any of the naturally occurring L-amino acids
  SITE (80): Xaa equals any of the naturally occurring L-amino acids
CEFKRVPQCPSGRVYVLKFKAGSKRLFFWMQEPKTDQDEEHCRKVNELSGTTPRCLGHWGPAEQRPRXLCAXRLRWXAEXAGET

SEQ ID NO: 1545 - protein, 22 aa, Homo sapiens
YLRLIYSTSITLLPISNNVKIK

SEQ ID NO: 1546 - protein, 112 aa, Homo sapiens
  SITE (29): Xaa equals any of the naturally occurring L-amino acids
  SITE (49): Xaa equals any of the naturally occurring L-amino acids
  SITE (51): Xaa equals any of the naturally occurring L-amino acids
  SITE (56): Xaa equals any of the naturally occurring L-amino acids
  SITE (57): Xaa equals any of the naturally occurring L-amino acids
  SITE (58): Xaa equals any of the naturally occurring L-amino acids
  SITE (64): Xaa equals any of the naturally occurring L-amino acids
  SITE (67): Xaa equals any of the naturally occurring L-amino acids
  SITE (70): Xaa equals any of the naturally occurring L-amino acids
  SITE (82): Xaa equals any of the naturally occurring L-amino acids
  SITE (85): Xaa equals any of the naturally occurring L-amino acids
  SITE (100): Xaa equals any of the naturally occurring L-amino acids
  SITE (102): Xaa equals any of the naturally occurring L-amino acids
  SITE (103): Xaa equals any of the naturally occurring L-amino acids
  SITE (107): Xaa equals any of the naturally occurring L-amino acids
  SITE (108): Xaa equals any of the naturally occurring L-amino acids
  SITE (110): Xaa equals any of the naturally occurring L-amino acids
  SITE (111): Xaa equals any of the naturally occurring L-amino acids
PSAAAGDLQRTAAMGAHLVRRYLGDASVXPDPLQMPTFPPDYGFPERKXRXMVATXXXMMDAHXSSXCGXTAPTNSSGCSIXTLXLPPLPWLANQERDKXEXXQTPXXFXXP

SEQ ID NO: 1547 - protein, 142 aa, Homo sapiens
KVSAVMAFLASGPYLTHQQKVLRLYKRALRHLESWCVQRDKYRYFACLMRARFEEHKNEKDMAKATQLLKEAEEEFWYRQHPQPYIFPDSPGGTSYERYDCYKVPEWCLDDWHPSEKAMYPDYFAKREQWKKLREGKLGTRG

SEQ ID NO: 1548 - protein, 98 aa, Homo sapiens
  SITE (4): Xaa equals any of the naturally occurring L-amino acids
  SITE (9): Xaa equals any of the naturally occurring L-amino acids
  SITE (11): Xaa equals any of the naturally occurring L-amino acids
  SITE (12): Xaa equals any of the naturally occurring L-amino acids
  SITE (22): Xaa equals any of the naturally occurring L-amino acids
  SITE (32): Xaa equals any of the naturally occurring L-amino acids
  SITE (36): Xaa equals any of the naturally occurring L-amino acids
  SITE (45): Xaa equals any of the naturally occurring L-amino acids
  SITE (62): Xaa equals any of the naturally occurring L-amino acids
  SITE (65): Xaa equals any of the naturally occurring L-amino acids
  SITE (66): Xaa equals any of the naturally occurring L-amino acids
  SITE (82): Xaa equals any of the naturally occurring L-amino acids
  SITE (84): Xaa equals any of the naturally occurring L-amino acids
  SITE (92): Xaa equals any of the naturally occurring L-amino acids
  SITE (95): Xaa equals any of the naturally occurring L-amino acids
  SITE (97): Xaa equals any of the naturally occurring L-amino acids
LYYXLGFLXLXXRLPLDAAKRXHDELGNERPXAYMXEHNQLNGWXSDENDWNEKLYPVWKRXDMXXEKLLEGRPVCKAVLTXDXPTLGGLKXNIXRXT

SEQ ID NO: 1549 - protein, 138 aa, Homo sapiens
  SITE (60): Xaa equals any of the naturally occurring L-amino acids
  SITE (72): Xaa equals any of the naturally occurring L-amino acids
  SITE (73): Xaa equals any of the naturally occurring L-amino acids
  SITE (122): Xaa equals any of the naturally occurring L-amino acids
  SITE (123): Xaa equals any of the naturally occurring L-amino acids
  SITE (128): Xaa equals any of the naturally occurring L-amino acids
  SITE (136): Xaa equals any of the naturally occurring L-amino acids
GCSLEQRSFISVRLLSYLSACRHPMEDSMDMDMSPLRPQNYLFGCELKADKDYHFKVDNXENEHQLSLRTVXXGAGAKDELHIVEAEAMNYEGSPIKVTLATLKMSVQPTVFPLGALNNTTXXLKVEXWFRAMPIXGQ

SEQ ID NO: 1550 - protein, 51 aa, Homo sapiens
TLAFFLIPCIGSPACPTMSDAAVDTSSEITTKDLKEKKEVVEEAEMEETPC

SEQ ID NO: 1551 - protein, 73 aa, Homo sapiens
  SITE (3): Xaa equals any of the naturally occurring L-amino acids
  SITE (6): Xaa equals any of the naturally occurring L-amino acids
  SITE (27): Xaa equals any of the naturally occurring L-amino acids
  SITE (37): Xaa equals any of the naturally occurring L-amino acids
  SITE (63): Xaa equals any of the naturally occurring L-amino acids
  SITE (67): Xaa equals any of the naturally occurring L-amino acids
KAXSVXLYKVRLQVPVRNSRVDPRVRXGGEQVSSTIXGLSGPPSRRGPFPLAWVILFLLEAQXGPWXLLPSAH

SEQ ID NO: 1552 - protein, 131 aa, Homo sapiens
  SITE (4): Xaa equals any of the naturally occurring L-amino acids
  SITE (5): Xaa equals any of the naturally occurring L-amino acids
  SITE (96): Xaa equals any of the naturally occurring L-amino acids
  SITE (104): Xaa equals any of the naturally occurring L-amino acids
  SITE (114): Xaa equals any of the naturally occurring L-amino acids
  SITE (115): Xaa equals any of the naturally occurring L-amino acids
  SITE (119): Xaa equals any of the naturally occurring L-amino acids
  SITE (124): Xaa equals any of the naturally occurring L-amino acids
  SITE (129): Xaa equals any of the naturally occurring L-amino acids
NSAXXELLTQPGDWTLFVPTNDAFKGMTSEEKEILIRDKNALQNIILYHLHQEFSLEKDLNLVLLTFLKTTQGSKIFLEGSEMVTLLVNGFGNPKXSDIHGPPXVVISCCRLNXXFPAXTPFGXGSTGXDT

SEQ ID NO: 1553 - protein, 106 aa, Homo sapiens
  SITE (3): Xaa equals any of the naturally occurring L-amino acids
  SITE (55): Xaa equals any of the naturally occurring L-amino acids
  SITE (94): Xaa equals any of the naturally occurring L-amino acids
  SITE (103): Xaa equals any of the naturally occurring L-amino acids
WIXRAAGIRHEVADTMLPPMALPSVSWMLLSCLMLLSQVQGEEPQRELPSARIRXPKGSKAYGSHCYALFLSPKSWTDADLACQKRPSGNLVSXLSGAEGSFXPPW

SEQ ID NO: 1554 - protein, 117 aa, Homo sapiens
  SITE (109): Xaa equals any of the naturally occurring L-amino acids
ATFPREWLCDRHLREKMFSSVAHLARANPFNTPHLQLVHDGLGDLRSSSPGPTGQPRRPRNLAAAAVEEQYSCDYGSGRFFILCGLGGIISCGTTHTALVPLDLVKCRXRFVFACWT

SEQ ID NO: 1555 - protein, 164 aa, Homo sapiens
  SITE (79): Xaa equals any of the naturally occurring L-amino acids
  SITE (86): Xaa equals any of the naturally occurring L-amino acids
  SITE (125): Xaa equals any of the naturally occurring L-amino acids
EKKVERQTELKRKFEQMKQDRITRYQGVNLYVKNLDDGIDDERLRKEFSPFGTITSAKVMMEGGRSKGFGFVCFSSPEXATKAVTXMNGRIVATKPLYVALAQRKEERQAHLTNQYMQRMASVRXVPNPVINPYQPAPPSGYFMAAIPQTQNVLHTILLAKLLN

SEQ ID NO: 1556 - protein, 166 aa, Homo sapiens
  SITE (1): Xaa equals any of the naturally occurring L-amino acids
  SITE (2): Xaa equals any of the naturally occurring L-amino acids
  SITE (7): Xaa equals any of the naturally occurring L-amino acids
  SITE (9): Xaa equals any of the naturally occurring L-amino acids
  SITE (11): Xaa equals any of the naturally occurring L-amino acids
  SITE (12): Xaa equals any of the naturally occurring L-amino acids
  SITE (13): Xaa equals any of the naturally occurring L-amino acids
  SITE (14): Xaa equals any of the naturally occurring L-amino acids
  SITE (150): Xaa equals any of the naturally occurring L-amino acids
  SITE (157): Xaa equals any of the naturally occurring L-amino acids
XXLTLTXGXKXXXXTAVAAALATSGSPGPVRNSARAGTSEFLNKVTEAQEDGQSTSELIGQFGVGFYSAFLVADKVIVTSKHNNDTQHIWESDSNEFSVIADPRGNTLGRGTTITLVLKEEASDYLELDTIKNLVKKYSQFINFPIYVWXSKTETVXEPMEEEGAA

SEQ ID NO: 1557 - protein, 127 aa, Homo sapiens
  SITE (1): Xaa equals any of the naturally occurring L-amino acids
  SITE (19): Xaa equals any of the naturally occurring L-amino acids
  SITE (20): Xaa equals any of the naturally occurring L-amino acids
  SITE (21): Xaa equals any of the naturally occurring L-amino acids
  SITE (38): Xaa equals any of the naturally occurring L-amino acids
  SITE (82): Xaa equals any of the naturally occurring L-amino acids
  SITE (83): Xaa equals any of the naturally occurring L-amino acids
  SITE (90): Xaa equals any of the naturally occurring L-amino acids
  SITE (95): Xaa equals any of the naturally occurring L-amino acids
  SITE (97): Xaa equals any of the naturally occurring L-amino acids
  SITE (103): Xaa equals any of the naturally occurring L-amino acids
  SITE (106): Xaa equals any of the naturally occurring L-amino acids
  SITE (107): Xaa equals any of the naturally occurring L-amino acids
  SITE (108): Xaa equals any of the naturally occurring L-amino acids
  SITE (113): Xaa equals any of the naturally occurring L-amino acids
  SITE (117): Xaa equals any of the naturally occurring L-amino acids
  SITE (120): Xaa equals any of the naturally occurring L-amino acids
XNVVEAQFDSRVRATGHSXXXYNKWETIEAWTQQVATXNPALISRSVIGTTFEGRAIYLLKVGKAGQNKPAIFMDCGFPMPXXWISPCIXPVGFXKXAVPFLXTFXXXLTNFXNNLXFYXPALWPQY

SEQ ID NO: 1558 - protein, 109 aa, Homo sapiens
  SITE (80): Xaa equals any of the naturally occurring L-amino acids
  SITE (101): Xaa equals any of the naturally occurring L-amino acids
  SITE (107): Xaa equals any of the naturally occurring L-amino acids
  SITE (108): Xaa equals any of the naturally occurring L-amino acids
KAGAAAGGPGVSGVCVCKSRYPVCGSDGTTYPSGCQLRAASQRAESRGEKAITQVSKGTCEQGPSIVTPPKDIWNVTGAXVYLSCEVIGIPTPVLIWNKVXRGHYGXXR

SEQ ID NO: 1559 - protein, 102 aa, Homo sapiens
GLRGHLRSSGSSIWNYIKFRKHVSRYDSRTTIFSPEGRLYQVEYAMEAIGHAGTCLGILANDGVLLAAERRNIHKLLDEVFFSEKIYKLNEDMACSVAGITF

SEQ ID NO: 1560 - protein, 159 aa, Homo sapiens
  SITE (146): Xaa equals any of the naturally occurring L-amino acids
STHASAAHPSTLTHPQRRIDTLNSDGYTPEPDKPRPMPMDTSVYESPYSDPEELKDKKLFLKRDNLLIADIELGCGNFGSVRQGVYRMRKKQIDVAIKVLKQGTEKADTEEMMREAQIMHQLDNPYIVRLIGVCQAEALMLVMEMXGAGAAQVPGRQEG

SEQ ID NO: 1561 - protein, 155 aa, Homo sapiens
  SITE (139): Xaa equals any of the naturally occurring L-amino acids
  SITE (140): Xaa equals any of the naturally occurring L-amino acids
RAHENEITKVRKVTFNGLNQMIVIELGTNPLKSSGIENGAFQGMKKLSYIRIADTNITSIPQGLPPSLTELHLDGNKISRVDAASLKGLNNLAKLGLSFNSISAVDNGSLANTPHLRELHLDNNKLTRVPGGLQSIKYXXGGYLHNNHISVVGSK

SEQ ID NO: 1562 - protein, 72 aa, Homo sapiens
  SITE (1): Xaa equals any of the naturally occurring L-amino acids
XNQNSNGLVFLLWGSYAQKKGSAIDRKRHHVLQTAHPSPLSVYRGFFGCRHFSKTNELLQKSGKKPIDWKEL

SEQ ID NO: 1563 - protein, 110 aa, Homo sapiens
  SITE (74): Xaa equals any of the naturally occurring L-amino acids
  SITE (104): Xaa equals any of the naturally occurring L-amino acids
RTRGRLLGHLKETWGHPRRASWVVRSRRCRHCLCFMRKMLAAVSRVLSGASQKPASRVLVASRNFANDATFEIXKCDLHRLEEALLSQQCSPREDGLKYYRMMXTVPEWN

SEQ ID NO: 1564 - protein, 95 aa, Homo sapiens
  SITE (4): Xaa equals any of the naturally occurring L-amino acids
  SITE (38): Xaa equals any of the naturally occurring L-amino acids
  SITE (47): Xaa equals any of the naturally occurring L-amino acids
  SITE (51): Xaa equals any of the naturally occurring L-amino acids
  SITE (61): Xaa equals any of the naturally occurring L-amino acids
  SITE (70): Xaa equals any of the naturally occurring L-amino acids
  SITE (88): Xaa equals any of the naturally occurring L-amino acids
  SITE (92): Xaa equals any of the naturally occurring L-amino acids
  SITE (94): Xaa equals any of the naturally occurring L-amino acids
LHSXCTRRGSGSLRLCSVARVGQRRMTSAAMSKPHSEXGTAFIQTQXLHAXMADTFLEHMXRLDIDSPPXTGRNTGIICTIGPASRSXGDGXGXD

SEQ ID NO: 1565 - protein, 50 aa, Homo sapiens
  SITE (29): Xaa equals any of the naturally occurring L-amino acids
  SITE (37): Xaa equals any of the naturally occurring L-amino acids
  SITE (42): Xaa equals any of the naturally occurring L-amino acids
  SITE (49): Xaa equals any of the naturally occurring L-amino acids
PTMAAIRKKLVIVGDGACGKTCLLIVFSXDQFPEVYXPTVLXELYCAHXG

SEQ ID NO: 1566 - protein, 161 aa, Homo sapiens
  SITE (155): Xaa equals any of the naturally occurring L-amino acids
AAMFNIRNIGKTLVTRTQGTKIASDGLKGRVFEVSLADLQNDEVAFRKFKLITEDVQGKNCLTNFHGMDLTRDKMCSMVKKWQTMIEAHVDVKTTDGYLLRLFCVGFTKKRNNQIRKTSYAQHQQVRQIRKKMMEIMTREVQTNDLKEVVNKLIXDALEKT

SEQ ID NO: 1567 - protein, 113 aa, Homo sapiens
PSLKGTKAGAPPRCGRSRTSGSPGLQEFGTSPGPRQSPARLVAMPRKIEEIKDFLLTARRKDAKSVKIKKNKDNVKFKVRCSRYLYTLVITDKEKAEKLKQSLPPGLAVKELK

SEQ ID NO: 1568 - protein, 48 aa, Homo sapiens
  SITE (8): Xaa equals any of the naturally occurring L-amino acids
  SITE (24): Xaa equals any of the naturally occurring L-amino acids
  SITE (33): Xaa equals any of the naturally occurring L-amino acids
GCNYGKPXHHGVNQLKFARSLQSXAEERAGRHXGALRVLNSYWVGEDS

SEQ ID NO: 1569 - protein, 120 aa, Homo sapiens
  SITE (6): Xaa equals any of the naturally occurring L-amino acids
  SITE (103): Xaa equals any of the naturally occurring L-amino acids
  SITE (106): Xaa equals any of the naturally occurring L-amino acids
GTSERXEHAMKASGTLREYKVVGRCLPTPKCHTPPLYRMRIFAPNHVVAKSRFWYFVSQLKKMKKSSGEIVYCGQVFEKSPLRVKNFGIWLRYDSRSGTHNMXREXRDLTNAGAVNQCNG

SEQ ID NO: 1570 - protein, 85 aa, Homo sapiens
  SITE (61): Xaa equals any of the naturally occurring L-amino acids
  SITE (78): Xaa equals any of the naturally occurring L-amino acids
CPPLWQEEVWLDPNETNEIANANSRQQIRKLIKDGLIIRKPVTVHSRARCRKNTLARRKGXHMGIVSGKVQPMPECQXRSHGLRK

SEQ ID NO: 1571 - protein, 135 aa, Homo sapiens
  SITE (134): Xaa equals any of the naturally occurring L-amino acids
FAKMTNTKGKRRGTRYMFSRPFRKHGVVPLATYMRIYKKGDIVDIKGMGTVQKGMPHKCYHGKTGRVYNVTQHAVGIVVNKQVKGKILAKRINVRIEHIKHSKSRDSFLKRVKENDQKKKEAKEKGTWVQLKRXP

SEQ ID NO: 1572 - protein, 71 aa, Homo sapiens
  SITE (7): Xaa equals any of the naturally occurring L-amino acids
  SITE (8): Xaa equals any of the naturally occurring L-amino acids
  SITE (13): Xaa equals any of the naturally occurring L-amino acids
  SITE (16): Xaa equals any of the naturally occurring L-amino acids
  SITE (23): Xaa equals any of the naturally occurring L-amino acids
  SITE (27): Xaa equals any of the naturally occurring L-amino acids
  SITE (30): Xaa equals any of the naturally occurring L-amino acids
  SITE (37): Xaa equals any of the naturally occurring L-amino acids
  SITE (42): Xaa equals any of the naturally occurring L-amino acids
  SITE (58): Xaa equals any of the naturally occurring L-amino acids
  SITE (65): Xaa equals any of the naturally occurring L-amino acids
  SITE (69): Xaa equals any of the naturally occurring L-amino acids
TATPANXXLPWGXKKXARRSKIXSFVXVCXYNHLMPXRYSVXYSPWGKAVRSLGCLPXFLALKRXARRXPR

SEQ ID NO: 1573 - protein, 68 aa, Homo sapiens
  SITE (59): Xaa equals any of the naturally occurring L-amino acids
  SITE (62): Xaa equals any of the naturally occurring L-amino acids
  SITE (67): Xaa equals any of the naturally occurring L-amino acids
AAAKGAAAMSAHLQWMVVRNCSSFLIKRNKQTYSTEPNNLKARNSFRYNGLIHRKTVGXEPXADGKXV

SEQ ID NO: 1574 - protein, 127 aa, Homo sapiens
  SITE (4): Xaa equals any of the naturally occurring L-amino acids
GRMXPAKKGGEKKKGRSAINEVVTREYTINIHKRIHGVGFKKRAPRALKEIRKFAMKEMGTPDVRIDTRLNKAVWAKGIRNVPYRIRVRLSRKRNEDEDSPNKLYTLVTYVPVTTFKNLQTVNVDEN

SEQ ID NO: 1575 - protein, 115 aa, Homo sapiens
  SITE (11): Xaa equals any of the naturally occurring L-amino acids
  SITE (12): Xaa equals any of the naturally occurring L-amino acids
  SITE (18): Xaa equals any of the naturally occurring L-amino acids
  SITE (29): Xaa equals any of the naturally occurring L-amino acids
  SITE (40): Xaa equals any of the naturally occurring L-amino acids
  SITE (49): Xaa equals any of the naturally occurring L-amino acids
  SITE (65): Xaa equals any of the naturally occurring L-amino acids
  SITE (82): Xaa equals any of the naturally occurring L-amino acids
  SITE (97): Xaa equals any of the naturally occurring L-amino acids
WFPRAAGFRHXXVQIRAXERKGTSSFGKXRNKTHTLCRRXGSKAYHLQXSTCGKFGYPAKRKRKXNWSAKAKRRNTTGTGRXRHLKFVYRRFRHGFXEGTTPKPKRAAVAASSSS

SEQ ID NO: 1576 - protein, 121 aa, Homo sapiens
  SITE (108): Xaa equals any of the naturally occurring L-amino acids
  SITE (114): Xaa equals any of the naturally occurring L-amino acids
  SITE (116): Xaa equals any of the naturally occurring L-amino acids
GRRSEMTKGTSSFGKRRNKTHTLCRRCGSKAYHLQKSTCGKCGYPAKRKRKYNWSAKAKRRNTTGTGRMRHLKIVYRRFRHGFREGTTPKPKRAAVAAFQFIFKNVNXFSHAIXCXGVLKN

SEQ ID NO: 1577 - protein, 61 aa, Homo sapiens
  SITE (57): Xaa equals any of the naturally occurring L-amino acids
  SITE (59): Xaa equals any of the naturally occurring L-amino acids
  SITE (61): Xaa equals any of the naturally occurring L-amino acids
GIVGKYGTRYGASLRKMVKKIEISQHAKYTCSFCGKTKMKRRAVGIWHCGSCMKTVXGXAX

SEQ ID NO: 1578 - protein, 74 aa, Homo sapiens
  SITE (42): Xaa equals any of the naturally occurring L-amino acids
  SITE (44): Xaa equals any of the naturally occurring L-amino acids
  SITE (51): Xaa equals any of the naturally occurring L-amino acids
  SITE (63): Xaa equals any of the naturally occurring L-amino acids
  SITE (67): Xaa equals any of the naturally occurring L-amino acids
  SITE (74): Xaa equals any of the naturally occurring L-amino acids
ELGKGKMEKPSPYPAQGPCIIYNEDNGIIKAFQKHPWNYSAXMXSKLKHFXSLLPGGACGDVXGIGXEMAFPGX

SEQ ID NO: 1579 - protein, 98 aa, Homo sapiens
  SITE (2): Xaa equals any of the naturally occurring L-amino acids
  SITE (81): Xaa equals any of the naturally occurring L-amino acids
  SITE (87): Xaa equals any of the naturally occurring L-amino acids
  SITE (91): Xaa equals any of the naturally occurring L-amino acids
SXMACARPLISVYSEKGESSGKNVTLPAVFKAPIRPDIVNFVHTNLRKNNRQPYAVSELAGHQTSAESWGTGRAVARIPRXRGGGTXRSGXGAFGNMC

SEQ ID NO: 1580 - protein, 72 aa, Homo sapiens
  SITE (4): Xaa equals any of the naturally occurring L-amino acids
  SITE (19): Xaa equals any of the naturally occurring L-amino acids
  SITE (50): Xaa equals any of the naturally occurring L-amino acids
  SITE (55): Xaa equals any of the naturally occurring L-amino acids
  SITE (64): Xaa equals any of the naturally occurring L-amino acids
  SITE (71): Xaa equals any of the naturally occurring L-amino acids
  SITE (72): Xaa equals any of the naturally occurring L-amino acids
LSLXGKKKKRLRVDKWWGXRKELATVRTICSHVQNMIKGVTLGFRYKMRXVYAHXPINVVIQEXGSIVEIXX

SEQ ID NO: 1581 - protein, 153 aa, Homo sapiens
AIMGRMHAPGKGLSQSALPYRRSVPTWLKLTSDDVKEQIYKLAKKGLTPSQIGVILRDSHGVAQVRFVTGNKILRILKSKGLAPDLPEDLYHLIKKAVAVRKHLERNRKDKDAKFRLILIESRIHRLARYYKTKRVLPPNWKYESSTASALVA

SEQ ID NO: 1582 - protein, 129 aa, Homo sapiens
GPANMGRVRTKTVKKAARVIIEKYYTRLGNDFHTNKRVCEEIAIIPSKKLRNKIAGYVTHLMKRIQRGPVRGISIKLQEEERERRDNYVPEVSALDQEIIEVDPDTKEMLKLLDFGSLSNLQSLSLQLG

SEQ ID NO: 1583 - protein, 109 aa, Homo sapiens
NNGRAKKGRGHVQPIRCTNCARCVPKDKAIKKFVIRNIVEAAAVRDISEASVFDAYVLPKLYVKLHYCVTVPSIARLLGIDPAKPGRTEHPHHDSDLLALHLRPPPKPM

SEQ ID NO: 1584 - protein, 119 aa, Homo sapiens
  SITE (60): Xaa equals any of the naturally occurring L-amino acids
  SITE (99): Xaa equals any of the naturally occurring L-amino acids
  SITE (118): Xaa equals any of the naturally occurring L-amino acids
VQRFIKIDGKVRTDITYPAGFMDVISIDKTGENFRLIYDTKGRFAVHRITPEEAKYKLCXVRKIFVGTKGIPHLVTHDARTIRYPDPLIKVNDPFILIXRLARLLISSISTLVTCVWXL

SEQ ID NO: 1585 - protein, 81 aa, Homo sapiens
  SITE (14): Xaa equals any of the naturally occurring L-amino acids
  SITE (26): Xaa equals any of the naturally occurring L-amino acids
  SITE (41): Xaa equals any of the naturally occurring L-amino acids
  SITE (53): Xaa equals any of the naturally occurring L-amino acids
  SITE (67): Xaa equals any of the naturally occurring L-amino acids
  SITE (72): Xaa equals any of the naturally occurring L-amino acids
  SITE (74): Xaa equals any of the naturally occurring L-amino acids
GRYAAKRFRKAQCXIVERLTNSMMMXGRNNGKKLMTVRIVXHAFEIIRLLTGXEPSAGPGERHHQHXSPGRXHXHWARRDC

SEQ ID NO: 1586 - protein, 111 aa, Homo sapiens
KNCIVLIDSTPYRQWYESHYALPLGRKKGAKLTPEEEEILNKKRSKKIQKKYDERKKNAKISSLLEEQFQQGKLLACIASRPGQCGRADGYVLEGKELEFYLRKIKARKGK

SEQ ID NO: 1587 - protein, 125 aa, Homo sapiens
  SITE (105): Xaa equals any of the naturally occurring L-amino acids
  SITE (117): Xaa equals any of the naturally occurring L-amino acids
RTMPGVTVKDVNQQEFVRALAAFLKKSGKLKVPEWVDTVKLAKHKELAPYDENWFYTRAASTARHLYLRGGAGVGSMTKIYGGRQRNGVMPSHFSRGSKSVARRXLQALGGAENGGXGPRWRPAN

SEQ ID NO: 1588 - protein, 38 aa, Homo sapiens
  SITE (4): Xaa equals any of the naturally occurring L-amino acids
  SITE (8): Xaa equals any of the naturally occurring L-amino acids
  SITE (19): Xaa equals any of the naturally occurring L-amino acids
  SITE (29): Xaa equals any of the naturally occurring L-amino acids
  SITE (33): Xaa equals any of the naturally occurring L-amino acids
  SITE (35): Xaa equals any of the naturally occurring L-amino acids
CMLXLVLXLLSSSSAEEYXGLSANQCAVXAKDXVXCGY

SEQ ID NO: 1589 - protein, 55 aa, Homo sapiens
GTATQGLSPVHTPGDGRLHKAVSVGPRVHIIEELQIFSSGQPVAESAPGTPTGGL

SEQ ID NO: 1590 - protein, 92 aa, Homo sapiens
  SITE (15): Xaa equals any of the naturally occurring L-amino acids
LEDGFGEHPFYHCLXAEVPKEHWTPEGHSIVGFAMYYFTYDPWIGKLLYLEDFFVMSDYRGFGIGSEILKNLSQVAMRCRCSSMHFFGSRME

SEQ ID NO: 1591 - protein, 139 aa, Homo sapiens
  SITE (1): Xaa equals any of the naturally occurring L-amino acids
  SITE (5): Xaa equals any of the naturally occurring L-amino acids
  SITE (8): Xaa equals any of the naturally occurring L-amino acids
  SITE (10): Xaa equals any of the naturally occurring L-amino acids
  SITE (56): Xaa equals any of the naturally occurring L-amino acids
  SITE (114): Xaa equals any of the naturally occurring L-amino acids
  SITE (117): Xaa equals any of the naturally occurring L-amino acids
  SITE (125): Xaa equals any of the naturally occurring L-amino acids
  SITE (133): Xaa equals any of the naturally occurring L-amino acids
XGGFXITXGXDEGKLVTPAGDRSGIPGSTHASGRDVSQKVLRSQTWVPRLPASEAXSRHRGKVKSFPKDDPSKPVHLTAFLGYKAGMTHIVREVDRPGSKVNKKEGGGGCDHCXDTXHGGLWALXATLENPRXLRNFKN

SEQ ID NO: 1592 - protein, 42 aa, Homo sapiens
AEHGDQDYIWHCIDLFLDFITVFRKLMMILAMNEKDKKKEKK

SEQ ID NO: 1593 - protein, 85 aa, Homo sapiens
  SITE (17): Xaa equals any of the naturally occurring L-amino acids
  SITE (25): Xaa equals any of the naturally occurring L-amino acids
  SITE (31): Xaa equals any of the naturally occurring L-amino acids
  SITE (33): Xaa equals any of the naturally occurring L-amino acids
  SITE (47): Xaa equals any of the naturally occurring L-amino acids
  SITE (56): Xaa equals any of the naturally occurring L-amino acids
  SITE (60): Xaa equals any of the naturally occurring L-amino acids
  SITE (62): Xaa equals any of the naturally occurring L-amino acids
  SITE (79): Xaa equals any of the naturally occurring L-amino acids
WIPRAAGSLSLAQRRGXTKTYTVGXEECTVXPXLSIPCKLQSGTHCXWTDQLLQGXEKGXQXRHLACLPREPGLGTWQXLRSQIA

SEQ ID NO: 1594 - protein, 183 aa, Homo sapiens
  SITE (80): Xaa equals any of the naturally occurring L-amino acids
  SITE (107): Xaa equals any of the naturally occurring L-amino acids
  SITE (122): Xaa equals any of the naturally occurring L-amino acids
  SITE (136): Xaa equals any of the naturally occurring L-amino acids
  SITE (151): Xaa equals any of the naturally occurring L-amino acids
  SITE (152): Xaa equals any of the naturally occurring L-amino acids
  SITE (160): Xaa equals any of the naturally occurring L-amino acids
AARGAQRDTREPTMAPFEPLASGILLLLWLIAPSRACTCVPPHPQTAFCNSDLVIRAKFVGTPEVNQTTLYQRYEIKMTXMYKGFQALGDAADIRFVYTPAMESVCXYFHRSHNRSEEFLIXGKLQDGLLHITTCXFVAPWNSLSLAQRRXXTKTYTVGXEEMHKCFPVYPSPANCRVGTHCL

SEQ ID NO: 1595 - protein, 153 aa, Homo sapiens
  SITE (143): Xaa equals any of the naturally occurring L-amino acids
  SITE (151): Xaa equals any of the naturally occurring L-amino acids
STCPDEQCVNSPGSYQCVPCTEGFRGWNGQCLDVDECLEPNVCANGDCSNLEGSYMCSCHKGYTRTPDHKHCRDIDECQQGNLCVNGQCKNTEGSFRCTVDRGYQLSAAKDQFEDIDECHTVISVAHGHARTLKLFSMCFLTXVTEHLGLXTL

SEQ ID NO: 1596 - protein, 111 aa, Homo sapiens
  SITE (102): Xaa equals any of the naturally occurring L-amino acids
LGSSAMAPSRKFFVGGNWKMNGRKQSLGELIGTLNAAKVPADTEVVCAPPTAYIDFARQKLDPKIAVAAQNCYKVTNGAFTGEISPGMIKDCGPRGWSWGTXREACLWGIR

SEQ ID NO: 1597 - protein, 82 aa, Homo sapiens
  SITE (19): Xaa equals any of the naturally occurring L-amino acids
  SITE (71): Xaa equals any of the naturally occurring L-amino acids
  SITE (79): Xaa equals any of the naturally occurring L-amino acids
  SITE (80): Xaa equals any of the naturally occurring L-amino acids
IFEDSDSLRLRRDVLPAAXVQAALPATSCVPHAKVPKSHVHPRSALSLTCLLLVHLSIAHLHLASINALLXQPYHPGSXXSP

SEQ ID NO: 1598 - protein, 52 aa, Homo sapiens
  SITE (1): Xaa equals any of the naturally occurring L-amino acids
  SITE (3): Xaa equals any of the naturally occurring L-amino acids
  SITE (16): Xaa equals any of the naturally occurring L-amino acids
  SITE (19): Xaa equals any of the naturally occurring L-amino acids
  SITE (26): Xaa equals any of the naturally occurring L-amino acids
  SITE (36): Xaa equals any of the naturally occurring L-amino acids
  SITE (47): Xaa equals any of the naturally occurring L-amino acids
  SITE (48): Xaa equals any of the naturally occurring L-amino acids
  SITE (49): Xaa equals any of the naturally occurring L-amino acids
XKXGRNKARPLTSLRXTFXATFCPVXGTYILNDCPXTHSGIFFFLKXXXKAF

SEQ ID NO: 1599 - protein, 32 aa, Homo sapiens
  SITE (4): Xaa equals any of the naturally occurring L-amino acids
  SITE (9): Xaa equals any of the naturally occurring L-amino acids
  SITE (11): Xaa equals any of the naturally occurring L-amino acids
  SITE (15): Xaa equals any of the naturally occurring L-amino acids
  SITE (26): Xaa equals any of the naturally occurring L-amino acids
  SITE (27): Xaa equals any of the naturally occurring L-amino acids
AFNXSYRKXVXAVRXEFRVTQRPGLXXLGLEF

SEQ ID NO: 1600 - protein, 19 aa, Homo sapiens
  SITE (12): Xaa equals any of the naturally occurring L-amino acids
  SITE (13): Xaa equals any of the naturally occurring L-amino acids
  SITE (15): Xaa equals any of the naturally occurring L-amino acids
ARGFFFFFFFFXXFXFFKK

SEQ ID NO: 1601 - protein, 22 aa, Homo sapiens
  SITE (2): Xaa equals any of the naturally occurring L-amino acids
  SITE (20): Xaa equals any of the naturally occurring L-amino acids
  SITE (22): Xaa equals any of the naturally occurring L-amino acids
RXNRVFFFFFFFFFFFFFFXPX

SEQ ID NO: 1602 - protein, 104 aa, Homo sapiens
  SITE (98): Xaa equals any of the naturally occurring L-amino acids
DFGRSFLLWFSLFFLPFYSARISGGLMVGYNVSVLLQIGLKGYPAESPAFLSSIYFSGKLFFLFFFKVNLCIELNCISVFPAYVYIIPMIPNSYLYFXTNSQSE

SEQ ID NO: 1603 - protein, 86 aa, Homo sapiens
  SITE (30): Xaa equals any of the naturally occurring L-amino acids
  SITE (45): Xaa equals any of the naturally occurring L-amino acids
  SITE (62): Xaa equals any of the naturally occurring L-amino acids
  SITE (63): Xaa equals any of the naturally occurring L-amino acids
  SITE (73): Xaa equals any of the naturally occurring L-amino acids
  SITE (80): Xaa equals any of the naturally occurring L-amino acids
  SITE (81): Xaa equals any of the naturally occurring L-amino acids
FLMLSFMGIVTFLFSKSHCWNHQGCGMSLXVLFMQVTVTFAIMAXFETLIMCFYFFIPVKMXXKRKKVVIAPXISGSKLXXKFPKK

SEQ ID NO: 1604 - protein, 34 aa, Homo sapiens [sequence omitted]

SEQ ID NO: 1605 - protein, 53 aa, Homo sapiens
  SITE (17): Xaa equals any of the naturally occurring L-amino acids
  SITE (30): Xaa equals any of the naturally occurring L-amino acids
  SITE (37): Xaa equals any of the naturally occurring L-amino acids
  SITE (43): Xaa equals any of the naturally occurring L-amino acids
  SITE (45): Xaa equals any of the naturally occurring L-amino acids
  SITE (48): Xaa equals any of the naturally occurring L-amino acids
LLVWSEYNTSIITYNSXPGTGGYKYNFFKXNSWLSTXLQVPLXGXLWXITLGK

SEQ ID NO: 1606 - protein, 32 aa, Homo sapiens
  SITE (15): Xaa equals any of the naturally occurring L-amino acids
  SITE (17): Xaa equals any of the naturally occurring L-amino acids
  SITE (20): Xaa equals any of the naturally occurring L-amino acids
  SITE (22): Xaa equals any of the naturally occurring L-amino acids
  SITE (23): Xaa equals any of the naturally occurring L-amino acids
  SITE (28): Xaa equals any of the naturally occurring L-amino acids
  SITE (31): Xaa equals any of the naturally occurring L-amino acids
DAWADAWGKVSSSLXSXICXLXXRKVRXGQXM

SEQ ID NO: 1607 - protein, 31 aa, Homo sapiens
  SITE (10): Xaa equals any of the naturally occurring L-amino acids
  SITE (28): Xaa equals any of the naturally occurring L-amino acids
  SITE (30): Xaa equals any of the naturally occurring L-amino acids
LIMDTILNKXIQVKPVKEKEIKVSGSCXSXV

SEQ ID NO: 1608 - protein, 107 aa, Homo sapiens
  SITE (24): Xaa equals any of the naturally occurring L-amino acids
  SITE (34): Xaa equals any of the naturally occurring L-amino acids
  SITE (38): Xaa equals any of the naturally occurring L-amino acids
  SITE (55): Xaa equals any of the naturally occurring L-amino acids
  SITE (74): Xaa equals any of the naturally occurring L-amino acids
  SITE (76): Xaa equals any of the naturally occurring L-amino acids
  SITE (77): Xaa equals any of the naturally occurring L-amino acids
  SITE (79): Xaa equals any of the naturally occurring L-amino acids
  SITE (87): Xaa equals any of the naturally occurring L-amino acids
  SITE (97): Xaa equals any of the naturally occurring L-amino acids
  SITE (101): Xaa equals any of the naturally occurring L-amino acids
  SITE (102): Xaa equals any of the naturally occurring L-amino acids
  SITE (103): Xaa equals any of the naturally occurring L-amino acids
  SITE (104): Xaa equals any of the naturally occurring L-amino acids
  SITE (107): Xaa equals any of the naturally occurring L-amino acids
DPQGIRHPHIVQLKDFQCELGAGXLPKGVEKDIXFRPXLCLLKQQLGTVEPINLXFNPLGSFFAGQGGGRKPWXFXXFXSQLNPGQXNFLGPLKEKXFGPXXXXLSX

SEQ ID NO: 1609 - protein, 72 aa, Homo sapiens
  SITE (51): Xaa equals any of the naturally occurring L-amino acids
RQTSTAKLQKGGFCSRRKEDVYLQGAKQGELGSSCLRPNLHDDLQARVFKXSGKFPGKPEVKGQNCKSVEIG

SEQ ID NO: 1610 - protein, 77 aa, Homo sapiens
LYRGSVQGRVELLSEGSLGGPLRPGPDPVLQGLSQGQVHGETMGCLSDTDLALLSPPIRLSFLCSECLQGLDPGKEF

SEQ ID NO: 1611 - protein, 72 aa, Homo sapiens
  SITE (7): Xaa equals any of the naturally occurring L-amino acids
  SITE (15): Xaa equals any of the naturally occurring L-amino acids
  SITE (16): Xaa equals any of the naturally occurring L-amino acids
  SITE (25): Xaa equals any of the naturally occurring L-amino acids
  SITE (38): Xaa equals any of the naturally occurring L-amino acids
  SITE (42): Xaa equals any of the naturally occurring L-amino acids
  SITE (54): Xaa equals any of the naturally occurring L-amino acids
  SITE (58): Xaa equals any of the naturally occurring L-amino acids
  SITE (66): Xaa equals any of the naturally occurring L-amino acids
  SITE (71): Xaa equals any of the naturally occurring L-amino acids
ENLPSQXAPAGLPKXXQPCLYFYGXNGHKIIINLTKTXLFSXFLELSWSFLILXFGNXRLFLKCFXDVKIXY

SEQ ID NO: 1612 - protein, 63 aa, Homo sapiens
  SITE (11): Xaa equals any of the naturally occurring L-amino acids
  SITE (16): Xaa equals any of the naturally occurring L-amino acids
  SITE (25): Xaa equals any of the naturally occurring L-amino acids
  SITE (34): Xaa equals any of the naturally occurring L-amino acids
  SITE (47): Xaa equals any of the naturally occurring L-amino acids
  SITE (52): Xaa equals any of the naturally occurring L-amino acids
  SITE (53): Xaa equals any of the naturally occurring L-amino acids
  SITE (56): Xaa equals any of the naturally occurring L-amino acids
RESEMLCNLLXQLKHXMLRGRNYKXCSNLFWVIXMYLWVQALFGGFXFQRNXXKVXLLIKKRK

SEQ ID NO: 1613 - protein, 22 aa, Homo sapiens
  SITE (3): Xaa equals any of the naturally occurring L-amino acids
  SITE (5): Xaa equals any of the naturally occurring L-amino acids
  SITE (11): Xaa equals any of the naturally occurring L-amino acids
  SITE (12): Xaa equals any of the naturally occurring L-amino acids
KSXSXTAGDRXXTSGSPGLQEF

SEQ ID NO: 1614 - protein, 85 aa, Homo sapiens
  SITE (5): Xaa equals any of the naturally occurring L-amino acids
  SITE (6): Xaa equals any of the naturally occurring L-amino acids
  SITE (14): Xaa equals any of the naturally occurring L-amino acids
  SITE (15): Xaa equals any of the naturally occurring L-amino acids
  SITE (20): Xaa equals any of the naturally occurring L-amino acids
  SITE (46): Xaa equals any of the naturally occurring L-amino acids
  SITE (51): Xaa equals any of the naturally occurring L-amino acids
  SITE (63): Xaa equals any of the naturally occurring L-amino acids
  SITE (75): Xaa equals any of the naturally occurring L-amino acids
  SITE (78): Xaa equals any of the naturally occurring L-amino acids
  SITE (83): Xaa equals any of the naturally occurring L-amino acids
  SITE (85): Xaa equals any of the naturally occurring L-amino acids
DGGFXXFFFFFFFXXFFFYXWVISTCFIPAIKIIKNISNYYTHTKXVQSLXLPPTPRGKNCFXLWEVVSETRGQXTQXRLGGXRX

SEQ ID NO: 1615 - protein, 85 aa, Homo sapiens [sequence omitted]

SEQ ID NO: 1616 - protein, 29 aa, Homo sapiens
  SITE (7): Xaa equals any of the naturally occurring L-amino acids
  SITE (25): Xaa equals any of the naturally occurring L-amino acids
  SITE (26): Xaa equals any of the naturally occurring L-amino acids
  SITE (28): Xaa equals any of the naturally occurring L-amino acids
  SITE (29): Xaa equals any of the naturally occurring L-amino acids
AEGNIRXAKKKKKKKKKKKKKKKKXXKXX

SEQ ID NO: 1617 - protein, 37 aa, Homo sapiens
  SITE (4): Xaa equals any of the naturally occurring L-amino acids
  SITE (11): Xaa equals any of the naturally occurring L-amino acids
  SITE (20): Xaa equals any of the naturally occurring L-amino acids
  SITE (26): Xaa equals any of the naturally occurring L-amino acids
  SITE (36): Xaa equals any of the naturally occurring L-amino acids
GPAXWRETPPXLYKEFPGVXGSFSLXSEWGAQIWAXC

SEQ ID NO: 1618 - protein, 22 aa, Homo sapiens
  SITE (2): Xaa equals any of the naturally occurring L-amino acids
  SITE (5): Xaa equals any of the naturally occurring L-amino acids
  SITE (17): Xaa equals any of the naturally occurring L-amino acids
  SITE (22): Xaa equals any of the naturally occurring L-amino acids
GXGFXPSPSCFPQCLKXLDGLX

SEQ ID NO: 1619 - protein, 52 aa, Homo sapiens [sequence omitted]

SEQ ID NO: 1620 - protein, 52 aa, Homo sapiens
  SITE (28): Xaa equals any of the naturally occurring L-amino acids
  SITE (35): Xaa equals any of the naturally occurring L-amino acids
PTEQVTLGITAQSYSRVHINNRVYDLDXGSGHPDXAAAIKGSFVQRLKSYVI

SEQ ID NO: 1621 - protein, 113 aa, Homo sapiens
  SITE (87): Xaa equals any of the naturally occurring L-amino acids
  SITE (108): Xaa equals any of the naturally occurring L-amino acids
  SITE (112): Xaa equals any of the naturally occurring L-amino acids
LFPAPAPPPAPAFAPPPKVPSPERSAPRVPLPSPQPSYPFRPAASGGTPPPACLPPAQPCQVPPAMNLFRFLGKLSQLLAIILLLLXIWNSRSCAEIQEKNSPVWCGXFNGXI

SEQ ID NO: 1622 - protein, 21 aa, Homo sapiens
  SITE (6): Xaa equals any of the naturally occurring L-amino acids
VFKTMXQVSNDEIKHLFVLYQ

SEQ ID NO: 1623 - protein, 40 aa, Homo sapiens
  SITE (7): Xaa equals any of the naturally occurring L-amino acids
  SITE (10): Xaa equals any of the naturally occurring L-amino acids
  SITE (23): Xaa equals any of the naturally occurring L-amino acids
  SITE (29): Xaa equals any of the naturally occurring L-amino acids
  SITE (33): Xaa equals any of the naturally occurring L-amino acids
  SITE (39): Xaa equals any of the naturally occurring L-amino acids
  SITE (40): Xaa equals any of the naturally occurring L-amino acids
LRTSCFXLNXMIHFIKVPVIKYXVKYLLXWTIXCKLPFXX

SEQ ID NO: 1624 - protein, 95 aa, Homo sapiens
  SITE (4): Xaa equals any of the naturally occurring L-amino acids
  SITE (24): Xaa equals any of the naturally occurring L-amino acids
  SITE (39): Xaa equals any of the naturally occurring L-amino acids
  SITE (40): Xaa equals any of the naturally occurring L-amino acids
  SITE (78): Xaa equals any of the naturally occurring L-amino acids
  SITE (79): Xaa equals any of the naturally occurring L-amino acids
  SITE (82): Xaa equals any of the naturally occurring L-amino acids
  SITE (87): Xaa equals any of the naturally occurring L-amino acids
  SITE (95): Xaa equals any of the naturally occurring L-amino acids
IHPXLASQVAGHYRREHSRPRLKXAYSKKQFQFLSKLCXXRGSTDFLGPVNLNQSLRFCQESSLLSKWVFPNGHNGKXXRGXNIKKXKKNLGGGX

SEQ ID NO: 1625 - protein, 40 aa, Homo sapiens
  SITE (10): Xaa equals any of the naturally occurring L-amino acids
  SITE (16): Xaa equals any of the naturally occurring L-amino acids
  SITE (26): Xaa equals any of the naturally occurring L-amino acids
ARATMALWTXVSFAEXLERGSDEKVXLKRLARLLGLITAP

SEQ ID NO: 1626 - protein, 26 aa, Homo sapiens
  SITE (8): Xaa equals any of the naturally occurring L-amino acids
  SITE (26): Xaa equals any of the naturally occurring L-amino acids
ARAGIVPXHSSLGDRARLHLKKKKKX

SEQ ID NO: 1627 - protein, 171 aa, Homo sapiens
  SITE (59): Xaa equals any of the naturally occurring L-amino acids
  SITE (89): Xaa equals any of the naturally occurring L-amino acids
  SITE (118): Xaa equals any of the naturally occurring L-amino acids
  SITE (119): Xaa equals any of the naturally occurring L-amino acids
  SITE (121): Xaa equals any of the naturally occurring L-amino acids
  SITE (122): Xaa equals any of the naturally occurring L-amino acids
  SITE (123): Xaa equals any of the naturally occurring L-amino acids
  SITE (135): Xaa equals any of the naturally occurring L-amino acids
  SITE (155): Xaa equals any of the naturally occurring L-amino acids
ELQASENQPCSRHARPRLPSSLFPLPAQPSLPSSAGKAGTHSGCLPPGGKEREGGWVGXGLPPGNVTLPGPRIAPGPKPKAQPGTKLRXSAGRSYFYLPPPLLVPPPGRLAAESDTGXXKXXXEPWYPILGPGPXLGPNPSSVDNGVWNKCCLSXQQKKKKRGGRFRGFKA

SEQ ID NO: 1628 - protein, 120 aa, Homo sapiens
  SITE (53): Xaa equals any of the naturally occurring L-amino acids
  SITE (93): Xaa equals any of the naturally occurring L-amino acids
  SITE (110): Xaa equals any of the naturally occurring L-amino acids
  SITE (111): Xaa equals any of the naturally occurring L-amino acids
  SITE (117): Xaa equals any of the naturally occurring L-amino acids
RPARSPAEVGSRGLSSPPRAHHRPVSPAAPGRWSTSARVRTRKMVNYAWAGRXRRKLWWRSVAVLTCKSVVRPGYRGERLNRTILVSWFPSEXFPQDKLGALARPRRNPXXGIFIRXKRI

SEQ ID NO: 1629 - protein, 86 aa, Homo sapiens
NLVPGSSATYISLSSCCFVKRKRKKKPKLVRVISNYLIFCRSVIKNLVIPSTSYCEEQTLGPTLKSPLVTHSHPPGSCLPGRGCRK

SEQ ID NO: 1630 - protein, 35 aa, Homo sapiens
  SITE (26): Xaa equals any of the naturally occurring L-amino acids
LKKKFPEEEKKTTKNKTLKVDILCGXTFELNSEFF

SEQ ID NO: 1631 - protein, 40 aa, Homo sapiens
  SITE (12): Xaa equals any of the naturally occurring L-amino acids
  SITE (23): Xaa equals any of the naturally occurring L-amino acids
  SITE (29): Xaa equals any of the naturally occurring L-amino acids
  SITE (31): Xaa equals any of the naturally occurring L-amino acids
HEQPTAACICIXRQVPPVPAARXPQSRTXSXQAKLALTMP

SEQ ID NO: 1632 - protein, 97 aa, Homo sapiens
  SITE (1): Xaa equals any of the naturally occurring L-amino acids
  SITE (17): Xaa equals any of the naturally occurring L-amino acids
  SITE (26): Xaa equals any of the naturally occurring L-amino acids
  SITE (41): Xaa equals any of the naturally occurring L-amino acids
  SITE (44): Xaa equals any of the naturally occurring L-amino acids
  SITE (47): Xaa equals any of the naturally occurring L-amino acids
  SITE (53): Xaa equals any of the naturally occurring L-amino acids
  SITE (61): Xaa equals any of the naturally occurring L-amino acids
  SITE (74): Xaa equals any of the naturally occurring L-amino acids
  SITE (91): Xaa equals any of the naturally occurring L-amino acids
  SITE (95): Xaa equals any of the naturally occurring L-amino acids
XSGSPGPAGPRGPVGPXGPPGKDGTXGHPGAIGPPGPRGNXGEXGSXGSPGPXRATRALLXPPGAPGPCCGGVXAAAIAGIGRLKKLGRFXPRVXWG

SEQ ID NO: 1633 - protein, 43 aa, Homo sapiens
  SITE (31): Xaa equals any of the naturally occurring L-amino acids
  SITE (35): Xaa equals any of the naturally occurring L-amino acids
  SITE (38): Xaa equals any of the naturally occurring L-amino acids
  SITE (39): Xaa equals any of the naturally occurring L-amino acids
  SITE (40): Xaa equals any of the naturally occurring L-amino acids
EKKKKKKKKKKKKKKKKKKKKKKKKKGRPFXRIQXYVXXXATS

SEQ ID NO: 1634 - protein, 88 aa, Homo sapiens
  SITE (82): Xaa equals any of the naturally occurring L-amino acids
  SITE (88): Xaa equals any of the naturally occurring L-amino acids
ARAALSATKTCRPAFRGASAAPRGGGPARSPGRVLGRHAAGSLARLVGRSRGFWLLGGEVKSFCRCWGRRTRRERKKKKKKXLGKYFX

SEQ ID NO: 1635 - protein, 105 aa, Homo sapiens
  SITE (70): Xaa equals any of the naturally occurring L-amino acids
  SITE (102): Xaa equals any of the naturally occurring L-amino acids
YSHSGFCSPTDEDRCTNEADGNHPVEVHLRSDPDDARAMTGPAGVAPRGDQPWSSHRRKPLRSGKRRRKXKWQKQKEPQSSIGDHSMHFLPAATQTLPELLXNLM

SEQ ID NO: 1636 - protein, 47 aa, Homo sapiens
  SITE (5): Xaa equals any of the naturally occurring L-amino acids
  SITE (6): Xaa equals any of the naturally occurring L-amino acids
  SITE (46): Xaa equals any of the naturally occurring L-amino acids
QRPRXXGTGSGPPGPGKASHGGGAPVSRSGTGSEDGRESRATVVVXC

SEQ ID NO: 1637 - protein, 55 aa, Homo sapiens
  SITE (16): Xaa equals any of the naturally occurring L-amino acids
  SITE (19): Xaa equals any of the naturally occurring L-amino acids
  SITE (21): Xaa equals any of the naturally occurring L-amino acids
  SITE (31): Xaa equals any of the naturally occurring L-amino acids
  SITE (38): Xaa equals any of the naturally occurring L-amino acids
  SITE (49): Xaa equals any of the naturally occurring L-amino acids
  SITE (50): Xaa equals any of the naturally occurring L-amino acids
  SITE (55): Xaa equals any of the naturally occurring L-amino acids
GDPPEGPATSPLTNSXHPXSXGTAAATQRRXSEQGGRXTCGPAGAGSPXXPPRAX

SEQ ID NO: 1638 - protein, 55 aa, Homo sapiens
  SITE (3): Xaa equals any of the naturally occurring L-amino acids
  SITE (7): Xaa equals any of the naturally occurring L-amino acids
  SITE (11): Xaa equals any of the naturally occurring L-amino acids
  SITE (14): Xaa equals any of the naturally occurring L-amino acids
  SITE (18): Xaa equals any of the naturally occurring L-amino acids
  SITE (19): Xaa equals any of the naturally occurring L-amino acids
  SITE (20): Xaa equals any of the naturally occurring L-amino acids
  SITE (29): Xaa equals any of the naturally occurring L-amino acids
  SITE (30): Xaa equals any of the naturally occurring L-amino acids
  SITE (34): Xaa equals any of the naturally occurring L-amino acids
  SITE (35): Xaa equals any of the naturally occurring L-amino acids
  SITE (38): Xaa equals any of the naturally occurring L-amino acids
  SITE (39): Xaa equals any of the naturally occurring L-amino acids
  SITE (41): Xaa equals any of the naturally occurring L-amino acids
  SITE (42): Xaa equals any of the naturally occurring L-amino acids
  SITE (44): Xaa equals any of the naturally occurring L-amino acids
  SITE (49): Xaa equals any of the naturally occurring L-amino acids
IRXHATXYRGXFCXRRTXXXLHSANVTTXXLLLXXFYXXRXXAXVNISXVPHCPI

SEQ ID NO: 1639 - protein, 58 aa, Homo sapiens
  SITE (15): Xaa equals any of the naturally occurring L-amino acids
  SITE (54): Xaa equals any of the naturally occurring L-amino acids
ICPQNPLNPLVNLTXSPKRNSSLDTRKKPCRESKKFNTHSRPKSSHQLRKRSSXTPTT

SEQ ID NO: 1640 - protein, 37 aa, Homo sapiens
  SITE (30): Xaa equals any of the naturally occurring L-amino acids
  SITE (32): Xaa equals any of the naturally occurring L-amino acids
  SITE (34): Xaa equals any of the naturally occurring L-amino acids
  SITE (36): Xaa equals any of the naturally occurring L-amino acids
MCVDCMNDLEKKKKKKKKKKKKKKKKKKKXPXGXPXP

SEQ ID NO: 1641 - protein, 41 aa, Homo sapiens
YVWLGHFVAKVRTCLWKTSLWLGESVWPAASDLCRVLTCQG

SEQ ID NO: 1642 - protein, 99 aa, Homo sapiens
  SITE (1): Xaa equals any of the naturally occurring L-amino acids
  SITE (18): Xaa equals any of the naturally occurring L-amino acids
  SITE (19): Xaa equals any of the naturally occurring L-amino acids
  SITE (20): Xaa equals any of the naturally occurring L-amino acids
  SITE (26): Xaa equals any of the naturally occurring L-amino acids
  SITE (27): Xaa equals any of the naturally occurring L-amino acids
  SITE (40): Xaa equals any of the naturally occurring L-amino acids
  SITE (42): Xaa equals any of the naturally occurring L-amino acids
  SITE (49): Xaa equals any of the naturally occurring L-amino acids
  SITE (51): Xaa equals any of the naturally occurring L-amino acids
  SITE (95): Xaa equals any of the naturally occurring L-amino acids
XPAASYLMTLMEPLSLIXXXLSPPLXXSKENHFDARSCLXSXPKCSCSXPXPGISLPRDKSASEILHDSLCFQNPGLFCISSFLGPASCVPLKGXWAKT

SEQ ID NO: 1643 - protein, 42 aa, Homo sapiens
  SITE (2): Xaa equals any of the naturally occurring L-amino acids
  SITE (4): Xaa equals any of the naturally occurring L-amino acids
KXPXNLGKARLQVPVRNSRVDLRVFIYIDIYIDIYRYIYRYI

SEQ ID NO: 1644 - protein, 46 aa, Homo sapiens
  SITE (11): Xaa equals any of the naturally occurring L-amino acids
  SITE (26): Xaa equals any of the naturally occurring L-amino acids
  SITE (35): Xaa equals any of the naturally occurring L-amino acids
  SITE (40): Xaa equals any of the naturally occurring L-amino acids
  SITE (42): Xaa equals any of the naturally occurring L-amino acids
  SITE (43): Xaa equals any of the naturally occurring L-amino acids
RVGVRLAQVPXHLTSRSHHPHPVFHXRLKATMRMXHTEAXMXXNHL

SEQ ID NO: 1645 - protein, 69 aa, Homo sapiens
HVRLKPIFSPFFLLFSLAAHIVPLFYEPQFSGLSLKKKSSLNIAFRKLLFLDKKSYTLKKKKTFSRKIY

SEQ ID NO: 1646 - protein, 78 aa, Homo sapiens
  SITE (42): Xaa equals any of the naturally occurring L-amino acids
  SITE (43): Xaa equals any of the naturally occurring L-amino acids
  SITE (54): Xaa equals any of the naturally occurring L-amino acids
  SITE (68): Xaa equals any of the naturally occurring L-amino acids
  SITE (76): Xaa equals any of the naturally occurring L-amino acids
  SITE (77): Xaa equals any of the naturally occurring L-amino acids
IICFVLSFIYHFFLYKSIISRFLYYMIDINWVISSRQFVFSXXPPSTVSQRPDXVGKVFFLRIVKGSXQLGLIKAXXP

SEQ ID NO: 1647 - protein, 58 aa, Homo sapiens
ICPQNPLNPLVNLTVSPKRNSSLDTRKKPCRESKKFNTHSRPKSSHQLRKRSSSTPTT

SEQ ID NO: 1648 - protein, 59 aa, Homo sapiens
CLFLLPVMLLQIHISRSTVNVSTSRGTPPSTLSVKGQNETVRVKGTGRKFACLQVTRIR

SEQ ID NO: 1649 - protein, 110 aa, Homo sapiens
  SITE (11): Xaa equals any of the naturally occurring L-amino acids
  SITE (29): Xaa equals any of the naturally occurring L-amino acids
  SITE (54): Xaa equals any of the naturally occurring L-amino acids
  SITE (66): Xaa equals any of the naturally occurring L-amino acids
  SITE (71): Xaa equals any of the naturally occurring L-amino acids
  SITE (86): Xaa equals any of the naturally occurring L-amino acids
  SITE (88): Xaa equals any of the naturally occurring L-amino acids
  SITE (94): Xaa equals any of the naturally occurring L-amino acids
VPPPVPWGGPXREGEVSHTKADAPLVGGXWPGKIEGCAGLPLRAAQTALMCGGXARWVRAQEVAPXTVADXLPRVPGSSLYPWYAXNXWFPHPXAAKSLFPWISQAKLGL

SEQ ID NO: 1650 - protein, 74 aa, Homo sapiens
  SITE (11): Xaa equals any of the naturally occurring L-amino acids
  SITE (28): Xaa equals any of the naturally occurring L-amino acids
SPEGLSLLAPXPGRAPAGPTPLRGQCQXGSLTGAVHLSNGNAGVLRRAQGGQKPPVEQKGKSSLDLHFQYEYRP

SEQ ID NO: 1651 - protein, 83 aa, Homo sapiens
  SITE (30): Xaa equals any of the naturally occurring L-amino acids
  SITE (45): Xaa equals any of the naturally occurring L-amino acids
  SITE (49): Xaa equals any of the naturally occurring L-amino acids
  SITE (51): Xaa equals any of the naturally occurring L-amino acids
  SITE (52): Xaa equals any of the naturally occurring L-amino acids
  SITE (62): Xaa equals any of the naturally occurring L-amino acids
  SITE (64): Xaa equals any of the naturally occurring L-amino acids
  SITE (65): Xaa equals any of the naturally occurring L-amino acids
  SITE (67): Xaa equals any of the naturally occurring L-amino acids
NKGGGRMMTYPEVLPLTARTGACSVPWEHXAQLSGVQAVGSFPNXSISXPXXLKPVGQISKXLXXRXPFTNPRFCGQCPKGVG

SEQ ID NO: 1652 - protein, 90 aa, Homo sapiens
  SITE (11): Xaa equals any of the naturally occurring L-amino acids
  SITE (41): Xaa equals any of the naturally occurring L-amino acids
  SITE (43): Xaa equals any of the naturally occurring L-amino acids
  SITE (54): Xaa equals any of the naturally occurring L-amino acids
  SITE (55): Xaa equals any of the naturally occurring L-amino acids
  SITE (56): Xaa equals any of the naturally occurring L-amino acids
  SITE (76): Xaa equals any of the naturally occurring L-amino acids
  SITE (89): Xaa equals any of the naturally occurring L-amino acids
FFFFLDVKGIXFQRLLESLVYTDEGVRCCFPSESSASTEIXLXLIFDILHCLLXXXRSFLPFTSPSNYVQMCRLLXSGLSPKALTLGLXF

SEQ ID NO: 1653 - protein, 55 aa, Homo sapiens
  SITE (40): Xaa equals any of the naturally occurring L-amino acids
  SITE (42): Xaa equals any of the naturally occurring L-amino acids
  SITE (44): Xaa equals any of the naturally occurring L-amino acids
  SITE (48): Xaa equals any of the naturally occurring L-amino acids
  SITE (49): Xaa equals any of the naturally occurring L-amino acids
KLWFVFVFCLFHLFPSQPQTFCSLRELTFPFFFLFFFFGXLXVXNKIXXAIKKKK

SEQ ID NO: 1654 - protein, 61 aa, Homo sapiens
  SITE (2): Xaa equals any of the naturally occurring L-amino acids
  SITE (13): Xaa equals any of the naturally occurring L-amino acids
  SITE (16): Xaa equals any of the naturally occurring L-amino acids
  SITE (41): Xaa equals any of the naturally occurring L-amino acids
  SITE (47): Xaa equals any of the naturally occurring L-amino acids
  SITE (53): Xaa equals any of the naturally occurring L-amino acids
  SITE (58): Xaa equals any of the naturally occurring L-amino acids
  SITE (60): Xaa equals any of the naturally occurring L-amino acids
VXATNLPSLVIAXCSXIESLVPLLIWPQKPPNSPWLILTVXPKKGTXSLGPLXKKTLXKXN

SEQ ID NO: 1655 - protein, 20 aa, Homo sapiens
  SITE (17): Xaa equals any of the naturally occurring L-amino acids
  SITE (18): Xaa equals any of the naturally occurring L-amino acids
  SITE (19): Xaa equals any of the naturally occurring L-amino acids
  SITE (20): Xaa equals any of the naturally occurring L-amino acids
AAVLQTARRARSACRLXXXX

SEQ ID NO: 1656 - protein, 24 aa, Homo sapiens
  SITE (12): Xaa equals any of the naturally occurring L-amino acids
  SITE (13): Xaa equals any of the naturally occurring L-amino acids
  SITE (17): Xaa equals any of the naturally occurring L-amino acids
  SITE (19): Xaa equals any of the naturally occurring L-amino acids
ADIQTERAYQKXXTIFXNXKRVLL

SEQ ID NO: 1657 - protein, 34 aa, Homo sapiens
  SITE (10): Xaa equals any of the naturally occurring L-amino acids
  SITE (31): Xaa equals any of the naturally occurring L-amino acids
  SITE (34): Xaa equals any of the naturally occurring L-amino acids
AAACLPATEXSQHHEGLDLLSPLPGREGLGXPSX

SEQ ID NO: 1658 - protein, 51 aa, Homo sapiens
CKQYLTNPQVLNYQTCIKNFGWGDLGAEPNLRAVHAKTSPVKANYYTQLIQ

SEQ ID NO: 1659 - protein, 166 aa, Homo sapiens
  SITE (50): Xaa equals any of the naturally occurring L-amino acids
  SITE (53): Xaa equals any of the naturally occurring L-amino acids
  SITE (62): Xaa equals any of the naturally occurring L-amino acids
  SITE (72): Xaa equals any of the naturally occurring L-amino acids
  SITE (80): Xaa equals any of the naturally occurring L-amino acids
  SITE (84): Xaa equals any of the naturally occurring L-amino acids
  SITE (87): Xaa equals any of the naturally occurring L-amino acids
  SITE (88): Xaa equals any of the naturally occurring L-amino acids
  SITE (95): Xaa equals any of the naturally occurring L-amino acids
  SITE (98): Xaa equals any of the naturally occurring L-amino acids
  SITE (115): Xaa equals any of the naturally occurring L-amino acids
  SITE (117): Xaa equals any of the naturally occurring L-amino acids
  SITE (118): Xaa equals any of the naturally occurring L-amino acids
  SITE (122): Xaa equals any of the naturally occurring L-amino acids
  SITE (123): Xaa equals any of the naturally occurring L-amino acids
  SITE (125): Xaa equals any of the naturally occurring L-amino acids
  SITE (132): Xaa equals any of the naturally occurring L-amino acids
  SITE (133): Xaa equals any of the naturally occurring L-amino acids
  SITE (139): Xaa equals any of the naturally occurring L-amino acids
  SITE (144): Xaa equals any of the naturally occurring L-amino acids
  SITE (149): Xaa equals any of the naturally occurring L-amino acids
  SITE (160): Xaa equals any of the naturally occurring L-amino acids
  SITE (162): Xaa equals any of the naturally occurring L-amino acids
STHASGHSHSQASLAGSRVARVRCLLQLQDDRPEDALLLFLPQPRQEATXPQXPSRPSRGPXWLGLLKKAEXGGHPSQEXPGWXGEXXERRPPWXLNXRTFWNRIPEEQRARGPXLXXRGPXXVXPWGFLEXXPGKESXLRGGXFRGKXLFLIKAKLGIXFXKRKG

SEQ ID NO: 1660 - protein, 68 aa, Homo sapiens
  SITE (9): Xaa equals any of the naturally occurring L-amino acids
  SITE (12): Xaa equals any of the naturally occurring L-amino acids
  SITE (20): Xaa equals any of the naturally occurring L-amino acids
  SITE (21): Xaa equals any of the naturally occurring L-amino acids
  SITE (24): Xaa equals any of the naturally occurring L-amino acids
  SITE (25): Xaa equals any of the naturally occurring L-amino acids
  SITE (29): Xaa equals any of the naturally occurring L-amino acids
  SITE (39): Xaa equals any of the naturally occurring L-amino acids
  SITE (45): Xaa equals any of the naturally occurring L-amino acids
  SITE (51): Xaa equals any of the naturally occurring L-amino acids
  SITE (52): Xaa equals any of the naturally occurring L-amino acids
  SITE (66): Xaa equals any of the naturally occurring L-amino acids
SPGLQEFGXRGXRNRLNYAXXHHXXPHRXSIPTHALHSXRGDDAXLTIKIXXPPMVLEPTSTPDHXVD

SEQ ID NO: 1661 - protein, 61 aa, Homo sapiens
  SITE (47): Xaa equals any of the naturally occurring L-amino acids
  SITE (48): Xaa equals any of the naturally occurring L-amino acids
  SITE (54): Xaa equals any of the naturally occurring L-amino acids
LNADTLMNDQQQLSALKKTLIFEFTCWVPGSNGGKRPLFIKRGPPFXXPKDFLXFQIGKGT

SEQ ID NO: 1662 - protein, 54 aa, Homo sapiens
  SITE (3): Xaa equals any of the naturally occurring L-amino acids
  SITE (19): Xaa equals any of the naturally occurring L-amino acids
  SITE (22): Xaa equals any of the naturally occurring L-amino acids
  SITE (27): Xaa equals any of the naturally occurring L-amino acids
  SITE (47): Xaa equals any of the naturally occurring L-amino acids
TVXKKKKKKKKKKKNLEVXGIXNLDIXFGTSNPHSPTHAGGCACRTXLTDWWIL

SEQ ID NO: 1663 - protein, 95 aa, Homo sapiens
AREKLCVRGRGLFRCRVSSSCTLFKSLHWRNSAITSSLVAEGRGNIHLFMPVCCMQAFWLPTLQQNNCTNSLVPIPPTESPGATVFFALHCKERD

SEQ ID NO: 1664 - protein, 100 aa, Homo sapiens
  SITE (70): Xaa equals any of the naturally occurring L-amino acids
  SITE (85): Xaa equals any of the naturally occurring L-amino acids
  SITE (90): Xaa equals any of the naturally occurring L-amino acids
  SITE (91): Xaa equals any of the naturally occurring L-amino acids
VNQETTPVDCGALEGLVGVNLPTPYNCGRIQKSLSFYIHSLDVIGPLPPISLRCHASMGSGVVRKNKRRXDSLVMDKILTTVFPXGIPYXXFNFFFSLKN

SEQ ID NO: 1665 - protein, 33 aa, Homo sapiens
  SITE (11): Xaa equals any of the naturally occurring L-amino acids
  SITE (18): Xaa equals any of the naturally occurring L-amino acids
  SITE (21): Xaa equals any of the naturally occurring L-amino acids
  SITE (24): Xaa equals any of the naturally occurring L-amino acids
  SITE (26): Xaa equals any of the naturally occurring L-amino acids
SAPGGSCYSGXPRVPKCXIQXDPXSXPPCLQLV

SEQ ID NO: 1666 - protein, 47 aa, Homo sapiens
  SITE (26): Xaa equals any of the naturally occurring L-amino acids
  SITE (37): Xaa equals any of the naturally occurring L-amino acids
  SITE (39): Xaa equals any of the naturally occurring L-amino acids
GRVGGRVGGRVGREPQVYTLPPSREXMTKKQSAELPXSXGFYPTKSP

SEQ ID NO: 1667 - protein, 34 aa, Homo sapiens
  SITE (34): Xaa equals any of the naturally occurring L-amino acids
LEITLQGEPKLRPPKPERATLEQLKEHTPLFLPX

SEQ ID NO: 1668 - protein, 41 aa, Homo sapiens
  SITE (16): Xaa equals any of the naturally occurring L-amino acids
  SITE (26): Xaa equals any of the naturally occurring L-amino acids
  SITE (35): Xaa equals any of the naturally occurring L-amino acids
  SITE (36): Xaa equals any of the naturally occurring L-amino acids
  SITE (38): Xaa equals any of the naturally occurring L-amino acids
ICPQNPLNPLVNLTVXPKRNKLFGHXEKTLYREEXXFXNPY

SEQ ID NO: 1669 - protein, 96 aa, Homo sapiens
  SITE (20): Xaa equals any of the naturally occurring L-amino acids
  SITE (77): Xaa equals any of the naturally occurring L-amino acids
  SITE (84): Xaa equals any of the naturally occurring L-amino acids
  SITE (88): Xaa equals any of the naturally occurring L-amino acids
GRALPGRVRAATGEGRTFVXNGTVLLAPPRGGPLVSPLPARRRCVWEGVGCGPRPDLAVPPAAFCVAGAGRRGPLTXQTALAVXSSGXRLAGGTPT

SEQ ID NO: 1670 - protein, 140 aa, Homo sapiens
  SITE (50): Xaa equals any of the naturally occurring L-amino acids
  SITE (112): Xaa equals any of the naturally occurring L-amino acids
  SITE (128): Xaa equals any of the naturally occurring L-amino acids
  SITE (135): Xaa equals any of the naturally occurring L-amino acids
GSTHASGSTEKEGLLHEATLSVHQGLGLRGPWSSCSSPAPPWMHCCRAEXPLPGPALGFLETSFSFAIFFKWEKGGQLSLGKRGPATCPAWAPEPSSLTGQSLVGKAASWPXSLLMFLVSRVQSQLFXFLVVPVXEAFQN

SEQ ID NO: 1671 - protein, 34 aa, Homo sapiens
  SITE (2): Xaa equals any of the naturally occurring L-amino acids
  SITE (3): Xaa equals any of the naturally occurring L-amino acids
  SITE (20): Xaa equals any of the naturally occurring L-amino acids
  SITE (27): Xaa equals any of the naturally occurring L-amino acids
HXXMESDKMVTGSWGPRLSXHEGCSAXCISVYVV

SEQ ID NO: 1672 - protein, 113 aa, Homo sapiens
  SITE (2): Xaa equals any of the naturally occurring L-amino acids
  SITE (7): Xaa equals any of the naturally occurring L-amino acids
  SITE (12): Xaa equals any of the naturally occurring L-amino acids
RXLLTIXESWYXCRYRSGIPGGIPLSPRDPTLASWPTRSRESLRERRRSRAASGLGIRPLGPPLVSRVGRNRRLAHLAWVCPHVVIVQINAHSELAVYFLKFNIVFVILKYLL

SEQ ID NO: 1673 - protein, 86 aa, Homo sapiens
  SITE (85): Xaa equals any of the naturally occurring L-amino acids
PAFNFDPLFFLFVRCTRLPSCFSLLSCHQPFLLGGHVLGKRPHDLSGSTQCLRHPASFACIPQTISLILFTAANLSLVDETVFIXL

SEQ ID NO: 1674 - protein, 56 aa, Homo sapiens
SDYELLFKRKMLFIHAEVIQFPPSYRSILIHPTLEMQHLCGRLFHKPPRLLRLGRY

SEQ ID NO: 1675 - protein, 65 aa, Homo sapiens
  SITE (10): Xaa equals any of the naturally occurring L-amino acids
  SITE (24): Xaa equals any of the naturally occurring L-amino acids
  SITE (43): Xaa equals any of the naturally occurring L-amino acids
LVCILPKVRXPTLGITLLIVILVXILPGVMYSLKALNVCIATXHQILNGLSFGWNYKLKKCFSGK

SEQ ID NO: 1676 - protein, 52 aa, Homo sapiens
  SITE (44): Xaa equals any of the naturally occurring L-amino acids
PTEQVTLGITAQSYSRVHINNRVYDLDVGSGHPDGAAAIKGSFXQRLKSYVI

SEQ ID NO: 1677 - protein, 40 aa, Homo sapiens
  SITE (1): Xaa equals any of the naturally occurring L-amino acids
  SITE (2): Xaa equals any of the naturally occurring L-amino acids
  SITE (14): Xaa equals any of the naturally occurring L-amino acids
  SITE (26): Xaa equals any of the naturally occurring L-amino acids
  SITE (34): Xaa equals any of the naturally occurring L-amino acids
  SITE (37): Xaa equals any of the naturally occurring L-amino acids
  SITE (39): Xaa equals any of the naturally occurring L-amino acids
XXKKKKKKKKKKKXKKKKKKKKGGRXKGSKLTYXCMXRXS

SEQ ID NO: 1678 - protein, 49 aa, Homo sapiens
TAAMSIFTPTNQIRLTNVAVVRMKRARKRFEIACYRNKSSAGGGLWKKT

SEQ ID NO: 1679 - protein, 51 aa, Homo sapiens
AAAQQVVDQATEAGQKAMDQLAKTTQETIDKTANQASDTFSGIGKKFGLLK

SEQ ID NO: 1680 - protein, 41 aa, Homo sapiens
AFNRSQRGSCSATYETPTQKQVVYEWFSARFPTNVRCVTGE

SEQ ID NO: 1681 - protein, 34 aa, Homo sapiens
  SITE (2): Xaa equals any of the naturally occurring L-amino acids
GXGVRVNVRTSAGCSPHPNPLPKGRRGPVTQFAL

SEQ ID NO: 1682 - protein, 85 aa, Homo sapiens
  SITE (36): Xaa equals any of the naturally occurring L-amino acids
  SITE (64): Xaa equals any of the naturally occurring L-amino acids
  SITE (71): Xaa equals any of the naturally occurring L-amino acids
  SITE (78): Xaa equals any of the naturally occurring L-amino acids
  SITE (80): Xaa equals any of the naturally occurring L-amino acids
  SITE (85): Xaa equals any of the naturally occurring L-amino acids
ASNSNYALIGALRAVAQTISYEVTLAIIPTINITNXLAPLTSPPLSQHKNTPEYPAIITLWPYXIIFHTRXNNEPPSXLXKGNFX

SEQ ID NO: 1683 - protein, 53 aa, Homo sapiens
VGLEINMLAFIPVLTKKINPRSTEAAIKYFLTQATASIILLIAILFNNILSGQ

SEQ ID NO: 1684 - protein, 169 aa, Homo sapiens
  SITE (146): Xaa equals any of the naturally occurring L-amino acids
  SITE (152): Xaa equals any of the naturally occurring L-amino acids
  SITE (154): Xaa equals any of the naturally occurring L-amino acids
  SITE (156): Xaa equals any of the naturally occurring L-amino acids
  SITE (161): Xaa equals any of the naturally occurring L-amino acids
PVSAKKEKKVSCMFIPDGRVSVSARIDRKGFCEGDEISIHADFENTCSRIVVPKAAIVARHTYLANGQTKVLTQKLSSVRGNHIISGTCASWRGKSLRVQKIRPSILGCNILRVEYSLLIYVSVPGSKKVILDLPLVIGSRSGLSXRTSSWXAXTXSEDEXGRSEHPDT

SEQ ID NO: 1685 - DNA, 733 bp, Homo sapiens
gggatccggagcccaaatcttctgacaaaactcacacatgcccaccgtgcccagcacctgaattcgagggtgcaccgtcagtcttcctcttccccccaaaacccaaggacaccctcatgatctcccggactcctgaggtcacatgcgtggtggtggacgtaagccacgaagaccctgaggtcaagttcaactggtacgtggacggcgtggaggtgcataatgccaagacaaagccgcgggaggagcagtacaacagcacgtaccgtgtggtcagcgtcctcaccgtcctgcaccaggactggctgaatggcaaggagtacaagtgcaaggtctccaacaaagccctcccaacccccatcgagaaaaccatctccaaagccaaagggcagccccgagaaccacaggtgtacaccctgcccccatcccgggatgagctgaccaagaaccaggtcagcctgacctgcctggtcaaaggcttctatccaagcgacatcgccgtggagtgggagagcaatgggcagccggagaacaactacaagaccacgcctcccgtgctggactccgacggctccttcttcctctacagcaagctcaccgtggacaagagcaggtggcagcaggggaacgtcttctcatgctccgtgatgcatgaggctctgcacaaccactacacgcagaagagcctctccctgtctccgggtaaatgagtgcgacggccgcgactctagaggat

SEQ ID NO: 1686 - protein, 5 aa, Homo sapiens
  SITE (3): Xaa equals any of the naturally occurring L-amino acids
WSXWS

SEQ ID NO: 1687 - DNA, 86 bp, Homo sapiens
gcgcctcgagatttccccgaaatctagatttccccgaaatgatttccccgaaatgatttccccgaaatatctgccatctcaattag

SEQ ID NO: 1688 - DNA, 27 bp, Homo sapiens
gcggcaagctttttgcaaagcctaggc

SEQ ID NO: 1689 - DNA, 271 bp, Homo sapiens
ctcgagatttccccgaaatctagatttccccgaaatgatttccccgaaatgatttccccgaaatatctgccatctcaattagtcagcaaccatagtcccgcccctaactccgcccatcccgcccctaactccgcccagttccgcccattctccgccccatggctgactaattttttttatttatgcagaggccgaggccgcctcggcctctgagctattccagaagtagtgaggaggcttttttggaggcctaggcttttgcaaaaagctt

SEQ ID NO: 1690 - DNA, 32 bp, Homo sapiens
gcgctcgagggatgacagcgatagaaccccgg

SEQ ID NO: 1691 - DNA, 31 bp, Homo sapiens
gcgaagcttcgcgactccccggatccgcctc

SEQ ID NO: 1692 - DNA, 12 bp, Homo sapiens
ggggactttccc

SEQ ID NO: 1693 - DNA, 73 bp, Homo sapiens
gcggcctcgaggggactttcccggggactttccggggactttccgggactttccatcctgccatctcaattag

SEQ ID NO: 1694 - DNA, 256 bp, Homo sapiens
ctcgaggggactttcccggggactttccggggactttccgggactttccatctgccatctcaattagtcagcaaccatagtcccgcccctaactccgcccatcccgcccctaactccgcccagttccgcccattctccgccccatggctgactaattttttttatttatgcagaggccgaggccgcctcggcctctgagctattccagaagtagtgaggaggcttttttggaggcctaggcttttgcaaaaagctt

What is claimed is:

1. An isolated nucleic acid molecule comprising a polynucleotide having a nucleotide sequence at least 95% identical to a sequence selected from the group consisting of:
(a) a polynucleotide fragment of SEQ ID NO:X or a polynucleotide fragment of the cDNA sequence included in the related cDNA clone, which is hybridizable to SEQ ID NO:X;
(b) a polynucleotide encoding a polypeptide fragment of SEQ I) NO:Y or a polypeptide fragment encoded by the cDNA sequence included in the related cDNA clone, which is hybridizable to SEQ ID NO:X;
(c) a polynucleotide encoding a polypeptide fragment of a polypeptide encoded by SEQ ID NO:X or a polypeptide fragment encoded by the cDNA sequence included in the related cDNA clone, which is hybridizable to SEQ ID NO:X;
(d) a polynucleotide encoding a polypeptide domain of SEQ ID NO:Y or a polypeptide domain encoded by the cDNA sequence included in the related cDNA clone, which is hybridizable to SEQ ID NO:X;
(e) a polynucleotide encoding a polypeptide epitope of SEQ I) NO:Y or a polypeptide epitope encoded by the cDNA sequence included in the related cDNA clone, which is hybridizable to SEQ ID NO:X;
(f) a polynucleotide encoding a polypeptide of SEQ ID NO:Y or the cDNA sequence included in the related cDNA clone, which is hybridizable to SEQ ID NO:X, having biological activity;
(g) a polynucleotide which is a variant of SEQ ID NO:X;
(h) a polynucleotide which is an allelic variant of SEQ ID NO:X;
(i) a polynucleotide which encodes a species homologue of the SEQ ID. NO:Y;
(j) a polynucleotide capable of hybridizing under stringent conditions to any one of the polynucleotides specified in (a)-(i), wherein said polynucleotide does not hybridize under stringent conditions to a nucleic acid molecule having a nucleotide sequence of only A residues or of only T residues.

2. The isolated nucleic acid molecule of claim 1, wherein the polynucleotide fragment comprises a nucleotide sequence encoding a protein.

3. The isolated nucleic acid molecule of claim 1, wherein the polynucleotide fragment comprises a nucleotide sequence encoding the sequence identified as SEQ ID NO:Y or the polypeptide encoded by the cDNA sequence included in the related cDNA clone, which is hybridizable to SEQ ID NO:X.

4. The isolated nucleic acid molecule of claim 1, wherein the polynucleotide fragment comprises the entire nucleotide sequence of SEQ ID NO:X or the cDNA sequence included in the related cDNA clone, which is hybridizable to SEQ ID NO:X.

5. The isolated nucleic acid molecule of claim 2, wherein the nucleotide sequence comprises sequential nucleotide deletions from either the C-terminus or the N-terminus.

6. The isolated nucleic acid molecule of claim 3, wherein the nucleotide sequence comprises sequential nucleotide deletions from either the C-terminus or the N-terminus.

7. A recombinant vector comprising the isolated nucleic acid molecule of claim 1.

8. A method of making a recombinant host cell comprising the isolated nucleic acid molecule of claim 1.

9. A recombinant host cell produced by the method of claim 8.

10. The recombinant host cell of claim 9 comprising vector sequences.

11. An isolated polypeptide comprising an amino acid sequence at least 95% identical to a sequence selected from the group consisting of:
(a) a polypeptide fragment of SEQ ID NO:Y or of the sequence encoded by the cDNA included in the related cDNA clone;
(b) a polypeptide fragment of SEQ ID NO:Y or of the sequence encoded by the cDNA included in the related cDNA clone, having biological activity;
(c) a polypeptide domain of SEQ ID NO:Y or of the sequence encoded by the cDNA included in the related cDNA clone;
(d) a polypeptide epitope of SEQ ID NO:Y or of the sequence encoded by the cDNA included in the related cDNA clone;
(e) a full length protein of SEQ ID NO:Y or of the sequence encoded by the cDNA included in the related cDNA clone;
(f) a variant of SEQ ID NO:Y;
(g) an allelic variant of SEQ ID NO:Y; or
(h) a species homologue of the SEQ ID NO:Y.

12. The isolated polypeptide of claim 11, wherein the full length protein comprises sequential amino acid deletions from either the C-terminus or the N-terminus.

13. An isolated antibody that binds specifically to the isolated polypeptide of claim 11.

14. A recombinant host cell that expresses the isolated polypeptide of claim 11.

15. A method of making an isolated polypeptide comprising:
(a) culturing the recombinant host cell of claim 14 under conditions such that said polypeptide is expressed; and
(b) recovering said polypeptide.

16. The polypeptide produced by claim 15.

17. A method for preventing, treating, or ameliorating a medical condition, comprising administering to a mammalian subject a therapeutically effective amount of the polypeptide of claim 11 or the polynucleotide of claim 1.

18. A method of diagnosing a pathological condition or a susceptibility to a pathological condition in a subject comprising:
(a) determining the presence or absence of a mutation in the polynucleotide of claim 1; and
(b) diagnosing a pathological condition or a susceptibility to a pathological condition based on the presence or absence of said mutation.

19. A method of diagnosing a pathological condition or a susceptibility to a pathological condition in a subject comprising:
(a) determining the presence or amount of expression of the polypeptide of claim 11 in a biological sample; and
(b) diagnosing a pathological condition or a susceptibility to a pathological condition based on the presence or amount of expression of the polypeptide.

20. A method for identifying a binding partner to the polypeptide of claim 11 comprising:
(a) contacting the polypeptide of claim 11 with a binding partner; and
(b) determining whether the binding partner effects an activity of the polypeptide.

21. The gene corresponding to the cDNA sequence of SEQ ID NO:Y.

22. A method of identifying an activity in a biological assay, wherein the method comprises:
(a) expressing SEQ ID NO:X in a cell;
(b) isolating the supernatant;
(c) detecting an activity in a biological assay; and
(d) identifying the protein in the supernatant having the activity.

23. The product produced by the method of claim 20.
